United States Patent Application Publication US 2007/0243176 A1 - sequence listing, part 2

SEQ ID NO: 5394 - DNA, 593 bp, Homo sapiens
ttgtttgtttgtttgtttgtttgtttgtttaatgctgtttgagacctgctaaattgattttatgtcccactaatggattgagatttgtaggttttaaaacacaggttcaggctacaatggatataagcactacatattttttttcatatttcatacactatgtttctcaaaaaggaattttgctgcttttttttctttaatacttttttgtgaacagctgcatataagggtcatcatcactcttatcaatttacagtaaattttctttataaaaacagttaatttaggctggatttggtggctcacgcctgtaatcccagcaccttagaaggccgaggtgggcagatcacctgaggtcaggagttcgagaccagcctggccaacatggtaaaacgctgtctctactaaaaatacaaaaattaggctgtatggctcatgcctgtaatcccaacattttgggaggccgaggtgggtggatcacttgaggtcaggagtttgagaccaccctgaccaacatggtgaaaccctgtctctactaaaatacgaaaactagctgggcatggtagtgcgtgcctgtaaatcccaactactcg

SEQ ID NO: 5395 - DNA, 579 bp, Homo sapiens
ttgtgatgataatattttatgaagtgattctcttccctagccatttccaggaacaattgtataaagattgcattgaatctcattacagaaatttatccaaatataagtatccaatcctttattaattcatacattcattaatataatgaatatttgaatttttagtgtatactaggaactcactgaaggtagacttggaaacaaactaaataaattacctcacattatattttgaactgacgtattactatgaagaataaatgtgtacatgttttgagaagtaataaatgttatgaataaaagtaagagctatgtagacaaaaagttattgtcaagggtgcatggctacagtcataggatgggcaaggaaggaatctttgaggaggttacatttggacagaggcctgagtgaacttatctctctcaactgagaaccatatttctcaaatgcaaaaacatcaattgcaaagattctgatataggacgatacttggcattatgcagaaaagataactaaaccagagtgactgaagcaagataaggggaagaggggcttgggcagacaaagacatgtaggct

SEQ ID NO: 5396 - DNA, 614 bp, Homo sapiens
ggtgcagtctctgcttactacagtctagacctactgggctcaggtgattctcccacctcagcctcctgagtagctgagattacaggcacatgccaccacatccagctaatgttttgtgtttttagtagagaagaggttttgccatattttccaggctggtcttgaactcctggactcaggcaatctgcccaccttggcctctcaaagttctgggattacaggcataagccaccactccctgtgaaaacatggcttttaagcaagagcatgtacattatcataaagctttaaaaagaccacattagctggaatgtcaggaattgaataaagttgagggcagatacccaacaagcagatttaggaaattcatacatcacatgaaagatgaattaatctaatggatattgggttaacaataattgccaccgggtgcggtggctcacacatgtaatcccagcactttgggaggctaaggcgggtggatcacctgaggtcgggagttcgagaccagcctgaccaacatggagaaaccccgtctctactaaaaatacaaaattagcagggtgtggtggcacacgcctgaaatcccagctaccggggaggctgacacaggc

SEQ ID NO: 5397 - DNA, 614 bp, Homo sapiens
gatgctaaggtcaatgggagcaacttaggttaaagggtatctggagtgcgatgagcagctagcaattttaaatagggtgctcaaggaaggcctaatttaattttcatgaacagcacttacagagtttaagagatgacaagaggtaatatctgacttttatgagaaactctaaaaggataaatgcataggtaaaggctcaaacctaattttaataagtaagacttaaagaactaaatatgctgctatcagatgcttttcccctaacccatttattttaaattctatgcatatttatagaaatattaataatgtcaccactgaccaatggataaaagaagatatcaataaaccatgaagttatgcaattgggaaaataaacacaactttcttctttaagtaaaaccacattttactaccataaaatccccattgatttctacagttataccatttttcaactcaacttttcgccattttctatatagtgctgcaaacaagtttaatagctgatggtcctccaggcagattttatgcctttttgttgttgttgtttgctttaaatttttcaactgttgatcatgattattttactctagagatatgacatttctgct

SEQ ID NO: 5398 - DNA, 613 bp, Homo sapiens
aagctaagaattatgaggcttcagagcatttccccagaatgagaactagattctcctgcttcatatgtcccaatcaatggcacaactgcccaccctctatccctgcaactaaccaaaatccagatatttttatacctttgaaggaaggacaacattcacagagattcagtttcagtgagtacgttatgagaggctaatggagaacagctgcattccaaacttatttctttatggtgagctaataaaggatagattgctcacagggtgaaaagaagtgtgaaaatacatctgaatctttgaaacactgccacagatgacagcaaaataactatgccaataagatttgaggacatattgcaatctatgccactgttgcccactctatatgaaaacacaacacaattacaaaaactaaataacatttatttaacatttattaacctcttattgtgcatcaagctctgtgctaaacttcgggaattgaaaacaaatagaacactacccgtctcttcaggagctcacattttgttgtctgttggagacagataattgaacaaacaattataatagtgtggggaagtgctataataaaaccatatgcaagggcttacag

SEQ ID NO: 5399 - DNA, 615 bp, Homo sapiens
ctgtttgttcttttacattaaatttacaatgtatttgccatgtttcaaaaataaatttaattggaattttattgaaattgtatgagacatgatttagtccaagatgaacacacaacattattattactgtttccatccagctatgtcatatttctttgttttctctagttgtcttttatatcgctcaataaaatttgtggctctggtacatttcctaattatcatacattatatttcattatttctaattattataatggattgcatgtacatttactatgtaccagatattatgcaatatattcattatctcaattcataaaacaatcatgtgatttagttggtgttattactagattattaccattgtacaagtaaagaaaataaagacaaaagaaaagagactcagcaaaatcaaaccaataaagacttaattagaattgttgggcatatagtaaaaatttaatacaactcaatgaaggcaaaaaaacattttaaaaaatgaccaggcagatttgagaaggatccaaacagaaattccagaaataaaaacataattgttgaaattgaagacagatttgacagcagattacatacaattgaaaaggaaaatgt

SEQ ID NO: 5400 - DNA, 504 bp, Homo sapiens
gcatggcaggcttgtcttgaggaatattatcaggcatatgtaaacagacgctggggactggcttgtgcagttgaactggccctcttgcttttctatcactgccatgaagagaagaacatccctcaagtagtagattaggctaagaagtatgagagacaaacatagaagacctggattacaacttcatcttggagttaagcccagccaaccccagctaaatcagttgagtccaagctgacccacagatgcatgaataaatttattcaattcggccgggcgcggtggctcacgcctgtaatcccagcactttgggaggccgaggtgggcagatcacgaggtcaggagatcgagaccatcctggctaacaaggtgaaatcccgtctctgctaaaaatacagaaattagccgggggtggtggcgggcgcctatagtcccagctaatcgggaggctgaggcaggagaatggcgggtgaacccaggaggcggagtttgcagggagccgag

SEQ ID NO: 5401 - DNA, 564 bp, Homo sapiens
gagaacgtcgagatggagcccaactcactccagtgggtcggctcaccgtgtggcttgcacggaccttacattttctacaaggcttttcaattccaccttgaaggcaaaccaagaattttgtcccttggcgactttttctttgtaagatgtacgccaaaggatccgatttgcatagcggagctccagctgttgtgggaagagaggaccagccggcaacttttatccagctctaaactttatttcctcccagaagacactccccagggcagaaatagcgaccatggcgaggatgaagtcattgctgtttccgaaaaggtgattgtgaagcttgaagacctggtcaagtgggtacattctgatttctccaagtggagatgtggcttccacgctggaccagtgaaaactgaggccttgggaaggaatggacagaaggaagctctgctgaagtacaggcagtcaaccctaaacagtggactcaacttcaaagacgttctcaaggagaaggcagacctggcgccaaatcttaaaggcagaccacgcaaaaagaaaccatgcccacaaaga

SEQ ID NO: 5402 - DNA, 565 bp, Homo sapiens
ataataactaatttattaagtacttctgtgtgccagggattgttcctaagcttcctacaagaataaatttatttaatcttcctaagaatcctgtgaagtggatacagttgagcatcccaaatcccaaatgctccagaatccaaaactttttgagcactgacatgatgctcaaaggaaatgctcactgaagcattttggatttttggattggggatgctcaaccgtaagtataattaatgcagatattctaaaatctgaaaaatcctgatatctgaaacacttctggtcccaatcattttggataagggatactcaacctgtactacttactctctccatttcacagatgaagaaagtgaggtagggaaaaagataagtaacttgcccaaggttacatagcttactgtctcctaaccattattctatgctacctttcatgggccctcatgttaagagtaactcttcagtttagcaaattattctgcattatatgatgagcttacatataatagcaataatagaccagaagcggtggctcacacatgtaatcccaacactttgggag

SEQ ID NO: 5403 - DNA, 602 bp, Homo sapiens
cactgcaaattagtaaacattttatctaagtaaatcaaagtttgctaagttggcaatatgcacgctgctcttttgaattttgtatggttaaattgtttcttaggaaaattttctggattcaaacatggcatccctcacatccccttagagggaatgactggaaagttggactcaactgggattgtcaactagagtgccaaatggggccaattcaaggaaggaatgttccaagtgataggaaataaatgatgacagtttcttaaagcctgggctagaaaacgggcacagtgtaattccactgtacacaactggtgaaagcagttgtacagccccctcagattcaaggggagaggatataggatcacagctctcaatgggaggaatgttaacaaacttacagcaattttcattccaccatacaatttagtggtggattaggagagaaatattctgagttcttccatatctgaaaacgtcttcagtctgtcattttttggaggtgcatataccataatggaggcccagataccattttaagttggaaaatagatttttctctcataacctcaaaaacaatgctccatcttttggtgtcctgtgct

SEQ ID NO: 5404 - DNA, 580 bp, Homo sapiens
taacataaacatatgctaagcatgtactcaaatagaatgtttgcctatataacattttaaaggtaagttttaaagtatcaagtgaaaatatttttgatttgtatgtatatataaatgtatgtgtatatatacattcttaatatggtatagcatgtgactatcacaattcctaatctagatattttactctgtgatcttgggcaaggtattttcctttgctcacctaaataggttttttaaaactttttactttatctattaaatgtaaagtaaaacaatctgtatcagagatttgtgggcagaattaaaggaagccagagtacttggatcttcaggccgggcgctgtggttcacgcctgtaatcccagcactttgggaggctgaggtgggcagatcacgaggtcaggagatcgagaccatcctggctaacacggtgaagccctgtctctactaaaaatacacaaaattagccgggtgtgttggcgggtgcctgtagtcccagctactagggaggctgaggcaggagaatggcatgaacctgggaggtggagcttgcagtgagccgagatcgcaccactgc

SEQ ID NO: 5405 - DNA, 517 bp, Homo sapiens
atgtagaaatcagtatggtgggtgatggtataaggaaatctcagttttatatcctgctccatgaggatataaaacttgtatcaagctcagtgttttcccaacctagctataaattacatgttcctcattttgtctgagaccataacaactttaatgtccatgttcttacaaacagtctcctcaaggcaatctaggcttcttctagtatgaacctcaaaacccttccagcctcagctggacgtggtgcctcacacctgcaatcccggcactttgggaggctaaggcaggtggattgcttgaggtcagaagttcaagaccagtctggccaacatggcaaaaccctatctctgctaaaaaatacaaaaaaatagccaggcttggtggcacacacctgtactcccagctactcgggaggctgaggcaggagaatcgcttgaaactgggaggcaggggttgcagtgagccaagatcacgccactgcactccagcctgggttaacagagcaagactctatctc

SEQ ID NO: 5406 - DNA, 452 bp, Homo sapiens
ctgttgtccagggtggagggggggggcacaatcttggctcactgcaacctccgcctcctgggttcaagggattctcctgccttagcctcccaagtagctgggactatgggtgcctgccaccacgcccagctaatttttttatttttagtagagataggttttcaccatgggggccaggctggtctccaactcctcacttcaggtgatccacccacctcagcctcccaaagtgctgggtttatagatgtgaggtatgattctcaatgcaaatccgattcagtcttgggacacatatttatgataatatccttttctactttggaagagttaaggatagcaaattaaagcaaaccattttcttacagtataggtaatagaaaaaatttacatcaattttaccattattggtcttgataaacatagttgtgaatagatatgactcttgctttagt

SEQ ID NO: 5407 - DNA, 579 bp, Homo sapiens
aattagataaactgccaactatctaataatgggaaaagaaaggggttaaacttcgacacaaaatgtggaagaaggccgggcgcggtggctcacacctgtaatcccagcactttgggaggccgagatgggtggattacctgaggtcaggagttcgagaccagcctggccaacgtggtgaaaccctgtctctactaaaaatacaaaaaattagctgggtgaggtggtgggtgcctgtaatcccaacgggaggctgaggcaggagaatcgcttgaacccaggaggcagaggttgcagtgagccgagatcgtgctattgcagtccagcctgggcaacaagagcgaaactctgtctcaaaaaaataaataaataaataaatgtggaagaaatgtaaagactgtatatttctgctaataaatttgaaaacctaaataaaatggctaattgtctaggatattacaaattaccaaaatggaatcaagaagagatataatacagaatgtacaacaacatgaagaaattttttaaagtatcatagaactgaccccaaagagtactgaggtcagacagttccataggtga

SEQ ID NO: 5408 - DNA, 435 bp, Homo sapiens
gtacaggaactgaaagtgaaattttgcttatacttccaagatgaatggattgtgacattgttgatcgattctgcttggttgtcctaacaatttatgtaagtgacctcacatcattttggatctgatgatcttagcttacagattatgttacagcctattttgtctgcctctatatttgtagttacaaagtatgggaatgtagggcaaggttaccagtaaagatgtgtgtgtgtgcaatttccagcttcaagagctttggaaaaaagtgcagtaaccaaatctgtcacattcgaaatatataatatttcctgtgactacttctggtaaactgccctatcatagaaaactgaaggaatcagcaaatacccatgagctttgcttagaattgttccactatcattgatatcctgtgtatggatatgaatgactatggat

SEQ ID NO: 5409 - DNA, 468 bp, Homo sapiens
cctacaatagttttataagaatctatctcttgatagatgtatttaaaatgatacatttaaaagttgacattatgtaacaaataacattaatccaagattgccatgtaaacactactgtaagcacatatccctcttgaagagcattcatagagataaaagaattatagagttttaaaaaagactggcactgaactttgaattttaagtacaaaagaatactagttataataaatagaaataggcatagagaagataatttcaacacctaaaaacagattcgatcataaaaactaacattagttaatggattataactaagcaatattttgctttaaagggaaggcggggagaaaaattgaccttttgtgtttgtttgagtaaatgtatatttggcacatttccaaaaagattttggatggaagaaaatagcacaaagaagcctatgtttaaatatcacagttgtgacat

SEQ ID NO: 5410 - DNA, 593 bp, Homo sapiens
tgtctacaatattgcttgaggcaaatacactctatttgctggtcactgcgaattctaagcagagaatatcatatagaaaatataaattgtgcccttccttgagtacatacaccaaacaggaggaatactggtacaaaagtagatacatataccagtggtacagaaataaaggcaaatacttaaaacaaactgatctttcacaaaacatacaacaatataaactgggaaaaggacaccttattcaataaatcattctggggaaactggatagctacatgtagaagaataaaactggatccctatctctaacctcatataaaaaatcaacttaaggtggattaagacttaaatatatgacttgaagccataaaaattctagaagaaaatttaggaaaaactcttccagacattggcttaggcaatgaactaaggactaagaccccaaaagcaaatgcaaccaaaatataaataaataaatgggacctaattaaactaaaaagcttctgcacagcaaaataataatcagcagagtaaacagacaattcacggaatgggaaaaaatatttgcaaactatgcctctgacaactagtat

SEQ ID NO: 5411 - DNA, 468 bp, Homo sapiens
cataacagccaataaggttgctacattgaaggggatgaattttacttaaattatatttattaaaaaacagtaattgttttacagtcatgactatttatatcctctaaatttttgagacagggtctcactctgtcacacgagccggagtgcagtggcatgatcatggctcactgcagccttgacctcctgggcccaagtgatcctcctacctaagcctcccaagtagctgggaccataggcatgcaacatcatgcctggctaatttaaaaaaattttttttgtagagatggggcctcactatgttgcccaggctcgtctcgaacttgtgggctcaagcagtccttccgccttggcctcccaaagtgttggcattataagcatgagccactgaaaactttatttatttattttttgcccagtcttatggtgctaatgaaacttaattttattactctatcacacctatat

SEQ ID NO: 5412 - DNA, 560 bp, Homo sapiens
atacatacataaattattagtgggaatttggacaaatcctagctttactcaaaaccatgaggaaactcagctacagcaggatagactcaagaaaagcaaggatcatgcccttcagcagaagggatagttaggccagcccattgtcccaatactatgatgaaatcgaagccaggatcagggtgctgagaactgcactgggtagattttcactgaattaagaggaaaaagaaaaggtaatgaacattatgagaaaagattagggaaacagaaaacagacccaaaagacccagtgtatgtgtaacagaaatttcaaaaatagaggctgaaacaacacagatggaagagaaaaaataaatagaacaaaaatttgcagaccaaaataaattcttgagtctttagtttgaagtacagtgctgtaagaattaaagaagaatcatacctggaaacatcctgaaaaatattcttaagtttgtctttgaatacagacaaaaggacataaatatcttttagtaagaagttgcagaggccgggcgcggtggctcacgcctgtaatcccaaca

SEQ ID NO: 5413 - DNA, 384 bp, Homo sapiens
agcttctaaaagaaattttgcaacatcttacattgcatagtgcataggaaacaaagactcaccaggacaaagctcccaaattaagcactaggttagtttctgattggagaaactgttccgaggagctctgaaaaatagaactacatttatcaaagttttagtgttgataagaagggcacccgataggttttcattctcagctatgagtccacagacacgactagaggtgaaataagtcttattaaaagtaaaatccagtctcgacccagttcaatcacagaataaatggagatattcaacccctcaagctttctttctagcaaatgaaagggactctctatgatttgaaaataaaatcactctatcttgagtgtgtgtgtatgt

SEQ ID NO: 5414 - DNA, 593 bp, Homo sapiens
ggtatccacttccaaggtggcttgctcatatggctggcaagttggtgctggctgttggcaggaggcctcagctcacaatgcaggctttcataggactacgtgagtgtcctttcaacatggcagcaggccttccctagagctattgaaggatgagaaaacgacaaatcgcaatgtcttttatgacctaggctgggaagttatactccatcatttatgcaatatcctgttatcacacaggtcatccctattcagtgtaggttggtactacacaaggacatgaatatcaggaggaagagaatctctggaggccatcttggagcccatagtccgccttctgccccctaatgattcacgtcttcgtctgttcctgctctctaagagccaggaggcagacttcccttgagctttcttgcagctaaagtagagcatcattagcagtaaaaattaagatatcatcacaaaggccaggcacggtggctcacgcctgtaatcccaacactttgggaggccaaggtgggcggatcacctgaggtcaggagttcgagacatgcctggccaacatggtgaaaccctgtcttcactaaaaatacaaa

SEQ ID NO: 5415 - DNA, 505 bp, Homo sapiens
gtttgtcctgtgtttttatgtatgcacctacccatcaaaatacaccttattaagtgtacttgtagaaatgcgcttgccatacattcagagggggttgggttatatgagtttttatctattgaatatttcctcttggagatttaaaaattacattaccatattcaaagttctatgacgtcctccattaacaaattagtataattttgtatagtccacttttgaaaacttatttgcctttggaaaatgtagagtaaggctataatactagaactacaggacttcaagttcaactggaaagccatagtaaagcaaatagtaaggaattagcctgaagttagtcatatgggtcaatgaaactaaatagaatacagatataggtacatatacatcatatttaatttctgacaaagacagcaaggtaagttagtagagaaagcatagtctttcaaaaaattattctggataaaatttaaaaacaatcctcaatgctttgtacacaatatgc

SEQ ID NO: 5416 - DNA, 598 bp, Homo sapiens
tttccgggggaaggagagtgtattaatgtggcccatactgtccagcctcctggagcacagagcagtggacaaacagagctgagtgtatcttgggggcaaatggaacactctatgcatataaaaaacacttgcatgtactccataaatatgtaaaacattatgtatcaataaaagaaaaaatctagctcaaacagtaaacactcctgccacccctgaaactgacatttccttaagagggacatccaactgtgacctaaacacaatgcatcctgtcccctcccagaagctgaggtgtccatactcacagagggtccctttgacagctggtaatggctcccagagtctcttcctggaaggcacattgagcctggcaggcacccaagggcacatgaatctgacccctctggggattgctgtcagctgctgcagatggaaggtgctgcctctgcggcatctcaccacggagctcccattcctcagcaaccccccatacctgctggccaaactgggggaatagagacatgagggactttgacctgaatcccaagtaaaattactccaaaatatttgaaaatttgaaacaacaaatcatcccatc

SEQ ID NO: 5417 - DNA, 468 bp, Homo sapiens
ggtacggctgccaaaagaccacagaagggtttgagaaactctgcctgtatcttattgtcaagttgttaatatttatctttataaaatgtatcctaaatatatgcatgcagaattctggatcagagatagatttcatatcaaacggggggtagtaaatgtaataagtgcgctggtacccctagctccagtcttactcctgaggtaacgtgatgagagccaggtcaattgtcctacaggagaaggcaagaacaaggaaactgatttctcctgttcctaaaagggtaggaggcagttgccccctccgctcctgagaaagtctcctccttatccaatccttttgtgtggaaataaaatctagccagaagctggatagcttgggtgtctctgccttaatgatcttgagacttctttaaattcccagccttggcaggatgtggtggctcacacctgtaattccagcattttggg

SEQ ID NO: 5418 - DNA, 588 bp, Homo sapiens
atttttatgtatagggatagtgattgtctgtttatttcttggaccttagtttttaataacttctttttagattcattgtgaaagaacatcttgtcattttgaaagtaattttgtggtttgaggatataaaaacacagtacttttctatccaagatattatgtgttatatgcagtatcccctcaacgttagggaaaatcctaggttcagttgcttcctgaactacctcaagtcatggaggagctctgaaaacttctgctttgcttcacagggtcatggaccctgttaagagagaacccttcagggaattagagaatcctaattaagatttgcagaaggccgggcgtggtggctcacgcctgtaatcccagcactttgggaggccgaggtgggcagatcacaaggtcaggagatcgagaccatcctggctaacgcagtgaaaacccgtcgctactaaaaatacaaaaaaagtagccaggcgtggtggcgggtgcctgtagtcccagctactcgggagactgaggcaggagaatggcgtgaacctgggaggcagcgcttgcagtgagctgagatcacgccactgcactcca

SEQ ID NO: 5419 - DNA, 605 bp, Homo sapiens
agagcaaattcacctttcctccacatttttgtggaggctgagggccagttggatgctgcccacctgcattggtgggggtgatctatacttagtccactgattcaaatgctaatgtcttccagaaacaccctcacagacaacccagaaatattgttttatcatctatctggatgccccttaacccagtgtggtcgacacaaaattaaccatcacacctggtgggggaaacttggctaatacctacctcatgggaatcaaacaggatgttcccaagcatgagcctggacatggcaaatacacagtaaatggcaaattccctcacaaaccatccagggaacccactggaaccattgcagaatgctaagaacatctcctggtgtgtttggggattggacaacattcttgtagcaaatatctttaatcaaaaagtaacttaacacatatctttgagcatgtatatgttccagtaaagtatacatgctaagaggggtttgaaattatcttttcttctcagcactttacagtttacaaaatacttcaatgtgaattttagtcacgttagctcttgcaacaacttaataatgtaggatccccgcatataaatc

SEQ ID NO: 5420 - DNA, 495 bp, Homo sapiens
cacagtgtcatgcctgtaagcccagcactttggaaggccaaagcgggcagatcgcttgagcccaggagctcaaaactagcctgggcaacatggcaaaaccccgtctctaccaaaaatgcaaaatttagccgggcgtggtggggggcgcccgtagtcccagctacttgggaggctgaggcaggacaatcgcccgaactcgggaggcggaggttgcagtgcgccgagattgcgccactgcactccagtctggacgacagagccaacctcgtttccaaaaaaaagtgagttgtgcactgggtcgccaagatgtcgttcccaaagtatactccttcacccctggccactatgccctcaaaccagccgaataggacatgtcttcggaaacccagcgggcgcaagccaagtgattgaccattaagagcctggctgaaacctgcttaccctaactgccgagggctcatcgaaaatcctgccttgattccttggacctatgca

SEQ ID NO: 5421 - DNA, 524 bp, Homo sapiens
tttgttccttcataatctttaagtatttgcttaaatattactttcttaagtgaggtctaccctgatcaccctatttatatttgcaaatccctacactccctatcaccctcacctgtcttattttttttccatagcatgtatccccatctgatataatatatactttaaaaatgtattcgcttgtttattggtttgtttcccaccaacaaaatgtaagatctttgaagtcagggatttttgttttgttttgttcactgctatatcccacatatatagagcagtaccttatgattagtaggtgctcaataaatatcttgttattaaatgaattctttcaattttcagatcattgctttttaaattctgaattcagagactagatgattgctttttatcactacacttctcagttaagtttgtggggtaacaacatgtgaggtggtgcccgcgtttgttactggaacagctaagtgatttgactgtttcctcatttgggagcatttgggaggaaatatgcacatttg

SEQ ID NO: 5422 - DNA, 594 bp, Homo sapiens
gaagaggctttgccggaagaacattttggcagtagccctcagagaggcatatcttcagcccataaacacactgtgattggaaaccaaaggatgaattatctatgaacattggttttaagccctgcaacaggggcataatagggaggtggactgtgttcctgccagctcatggtgaacagctgttactccaccaagccccttcctgaaagacctaagttcatcccaacacaatctcccctgctcctcttactcctgcatcccagcattcctgcacccccaacagagtgggagcctccattcatcatcagcctacctgagctggaactgagttttactctaagggccacctactgtgtggcagcctgaactacaccaccaaataaaaacttgctatcagaaagatttagagctagtctaaaagataagcttcctaagaactccccaccttcagccctccaagtgataatattggctcatatatccaatccatcattacaacaagcagtctctgagaaagccattgcacagaagctatcaacaaccaagaaacccatacagacctcagcccactgaaagcatccagaaatataaagc

SEQ ID NO: 5423 - DNA, 579 bp, Homo sapiens
aaacagatatattaccaaaaaagtgttcaagacctgcattcctgaacaataaaaatacttgaacaatatttaatattaagaaaatgtcaattatccttaaattgatgcacaaatttaatatgatctcagttgatataatgtggattgtgtccctgcccaaatctcatattgaaatgtaattcccaatgtcgaaggtggggcctggtggaagttgattggaccatggggatggatttctcatgaatagtttagcaccatccctcttggtactgtccttgcaatagtgtgtgagttcttgtgatttctggtcgtttaaaagcgtgtagcatctcattccttgctctctcttgctcctgccacgtgaggtgcctgccccccatttgcctcctgccatgattgtaagtttcccgacacttctacaaaagccaagcagattccagcaccatgcttcctgtacaacctgcagaaccacgagccaattgaacctcttttctttgtaaatcacccagtaccaggtatttctttatagcaatgtgagaaaagcctaacacaccagtaaaaatagatttttatttggga

SEQ ID NO: 5424 - DNA, 580 bp, Homo sapiens
gtagtacaatgaccaggtttaactgtttatattatttccaatctatacttactgctatatgaaaatatctgaaccatgttattcaaaatacattttacaaacataataattttaactttttattggtctatttaataaaaggctaatcaagatcaaattttattttatctgggacattgacaactcgggaaaaacaagtttagctttgaaggcttaatagatatagctctgccttgataaaatcttttggcttcttcattcctttaattcttcatttcttcctttaaagtacaagagtgcattacgggcagggtggctcatgcctgtaatcccagcactttgggaggcccaagagagttgatcatgaggttgggagttcgagaccagcctggccaatatggtgaaaccccgtccatactaaaaatacaaaaattagccaggtgtggtggcatgtgcctgtagtcctagctacttgggaggctgagcagaagaattgcttgaacccgggaggcagaggttgcagtgagctgagatcaggccactgcattccagcctgggtgacaaagcgagactctgtctc

SEQ ID NO: 5425 - DNA, 538 bp, Homo sapiens
ttaagtgaaaatggggtgtgagccctctacctctaaaattacatgattatttaggatcatattttgaaaatgcacttgaaggatggatatatattgtaggttcaggactgtgagagaggaagctggttggaattcatgtttcatttcaactacctcagatccttcatgtgacctttatcgggcaaccattgtctggtaccctgcactgcaatacttttttacagttattattatactttaagttctgggacacatgtgcaggtttgttacataggtatacacttgccatggtggtttgctgtacccatcaacccatcatctacattaggttttttttctaatgctatccctcccctaacactccacccgccaacaagcccctgggtgtgatgttcccctccctgtgtctatgtgttctcattgttcaactcacttatgagtgagaacatgtggtgtttcgtattctgttcctgtgttagtttgctgagaatgatggtttccagcttcatccacgtccctgaaaaggacatgaactcat

SEQ ID NO: 5426 - DNA, 569 bp, Homo sapiens
ggtaattaaaaaagggtatgaggaccaaaaaatacacaaagattatgtagcaaagcctatagcctgaaaaagtaaacattgaaatttgtatgtccataaaatgtttacaaaattcagtacatattacacaccccaccctaaaaacatctaagcaaagtagagaatgtagaggtgctacagattatattctctgattatgacacaacaaaactagaaattacagcatggaaatttaaaagctttctcttaaataattctatgtcaaaaagaaatccaggccgggtacagtggctcatgcctgtaattccagtactttgggaggccaaggtgggcaggtcacttgaggtcaggagttcaagaccagcctcgtcaacatggcgacaccctgtctctactaaaaatacaaaaattagctgggcctggtggcgcatgcctgtaatcccagctacttaggaggctgaggcaggagaattccttgaacccagaaggtggaggttgcagtgagctgagattgcaccactgcactccagcctaggtgacacagcaagactctgtcaaaaaaaaaaaaa

SEQ ID NO: 5427 - DNA, 476 bp, Homo sapiens
cgagtgtgaatttaataagcatttattccaacctacatcatctgattataaaactcaggtggggttttgtcattatgtccttaatagttccatcttcactgtagatacaccattaatccatgttaatagttgtctataaaataaactgtatgatgattgctagaatttggcatattttttgaagttgttacatatgactaaattttaggccaggcgtggtggctcatgcctgtaatcccagcactttgggaggctgaggtgggcagatcacctgaggtcgggagttcgagaccagcctcacccacacggagaaactccatctctactaaaaataaaaaattagccgggcttggtggcacatgcctataatcccagctacttgggaaggctgaggcgggagaatcgcttgaacctgggaggtggaggttgcagtgagccgagatcgcgccattgcactccagcctgagcaacaagag

SEQ ID NO: 5428 - DNA, 517 bp, Homo sapiens
gtataatttttgaatatatatttacagaatgctaagtatacatcatgtatgagcaactacatttacatgcactagaagtgcttgctcagaaacttttcttgtttttctaatgaagtacttggtcaataaatgtttagggggttctaaaactcaaagggattccttatcttagatacatcttccagataaccaaattagatgaaaatgtgtttaaaatgtttctactcatttaaacataaaatatagtctgctcctaaatgggcaaactgaagtagcatgtttaacacatgaactgagaaaatgtatagcatactaaatggtattctagagaataaaagcaagaatgtaagaaattaaatgacctttactaacctatcttatgtaaatttatcatgtgattattcacatatatatttttagtttctgaactaattaccatacacacacacacacacacacacacaaacacacacacagacacacacaaagatagagagagaattttgtcatctctccc

SEQ ID NO: 5429 - DNA, 372 bp, Homo sapiens
caaaaaagcatgggggacctactctgtttaagcattgtagtgggtgctggggataattatgtgtaagacaagatccctaccttctaggggttcatagtctggaggcggaggtgaggggaagctactttcaactaagcacctagtaacttgttaagacataaagtaattggcgagtctgattcttccacaaggttttgaatccttgagggcagggactggtacaatactggtatagccacatatttcaaccattgatgcattccatgcatgtattcatgcacttttacattaccacttggtgattgaacatacatagggtgtacagtgaaggaacagcccacgtgattgtttctccaggttgaaggagggaga

SEQ ID NO: 5430 - DNA, 616 bp, Homo sapiens
caggttactgtgtacagagtcatccacacagatgactgaatactgaatttcctttgggtggtttgattgccccatctagacctgacctgagagtgctgacatccatcaaggcgcagaccaggcagtcatgatgcttcaaaaggagcaaaagaactaagtgctactgagcagaactctgtgccaacatgaaaataactgttaagaatccttttctgttcatatatggggtaaatttcagaggctaggttaagaaacgacattacaccaaattgcaacgatccagttgcagcttgagaagaaagcactgagatgaaatatttgtttcctcatgagaggttattatctctggcagccttctgagtgatttgttaaaatggaacacaaaccaaaagatgaatccgatgagacttcctagttgttacaaatggggcaaggtataaattgtgaggctgactggttcttttcacatgtacttgggcaacagcacaggtgtcctctgggcaaagaaggaaatagattgctgttgaaggaatatatatattttttaaatgtcacagcctgagtcccaaataatgaccttgatgtgcccctgccaaaaaaaaaaaaaaaaaaaaaa

SEQ ID NO: 5431 - DNA, 521 bp, Homo sapiens
tcagtttttcccacttctgcctgcttttttcttcagacatcttatggtagcgtcttgctaatgaggaatttggtttgagattttgtgtagttttttacttgatgaaatgtcccagttttagtttaacattgtccatcaccatccttaagatataacttgctgtttaaatacgtctgtcattattgttgattatttactaaagtttcatcagacaggtggggcaaccagggatttctattaagtgagaacaaaatacagcgttaataagtgactcaaaaacctccaaaacattatgctaagtaaaagaagtaatatatgaaaagttacatatggtatgattccatttatatgaaagatctaaaatagatacatccatagtgaaataactcagaatagtagttgccagaggctgagggtagggggagaattgggagacagtttaatggacaagggtttcattaccttgaagtaagtgaaatgttttggaattagaggtagtggttgggtgacattgtaaatgt

SEQ ID NO: 5432 - DNA, 557 bp, Homo sapiens
gaccgtcctgaacctcacacctctcagagccaggaaggcatttctctagatgagcacagtcccatagaaatagactgtgagtggccgggcgcggtggctcacacctgtaatcccagggctttgggaggccgaggtgggtggatcacctgaggtcaggagttcgagaccagcctggccaacatggcaaaacctcgtctctactaaaaatacaaaaactagccaggtgtggtggcgcatgactgtagtctcagctactcgggaggctgaggcaggggaattacttgaacccgggaggcgggagttgcggcgagctgggatcgtaccactgcactccagcctgggtgacagagcaagactctgtctctaaataaataaataaataaaataaaataaaagagaaagtaatagactgtgagccaggaggcaggaggatcgcttgagcccaggagtttaagaccagcctgggcaacatagggagaccctgtctctacaaaaaataaaaacaaacaaatgaaataactgggtgtgcaggtatgcacctgtagtcccagttactc

SEQ ID NO: 5433 - DNA, 509 bp, Homo sapiens
tggcaccattgtagggatctttctctttctcctgatctcaaagaaaaggtttctatatttcaccatttctatatttcaccactaagtataatttttgctgtaagttttttgcagataacttccatcagaatagagaagtttgccaagagttcgtatctataaatgaatgttacttttataaaacattttttctggctgggcgcggtagctcacgcctgtaatcccagcactttgggaggccgaggcaggcggatcacgaggtcaggagctcgagaccagcctggccaatatggtgaaaccccgtctctactaaaaatacaaaaattagccaggcatggtggcacacgcctatagtcccagctactcgggaagctgaggcagaagaattgcttgaacccgggaggcggaggttgcagtgagccgagaacgcgccactgcactccagcctgggcgacagagcgagactccgtcccacaaaaaaaaaaaaaaaaaaaaaaaaaatttttggg

SEQ ID NO: 5434 - DNA, 464 bp, Homo sapiens
ttagaatcctggagagagacaaaggccactaaaaagagacaaaatagatgttacaaagcccatatactaaagccaacattctctataaacagacccttaagttcttatttatactaactcattttcgtgacacaattgttagatgggaattcagagtaaaacacatttttattttaaagaatcatctatgctcacttatatatatttttcaataggtaattcatatacccagaacaaaaattaagtgaaaaggaactttctcttatcaaaagtaatcactattacctatataccttgtgacacaaaattttctaagtttatcttcccacactgaaacaaatgggaattaggagaaagagttgcatacaagcaagaattgccctttgacaggagggaggaaacaacaaaaaaaatttaaaccaggcagaaaaatctcaaaaagcatgttcacggtaatctccgca

SEQ ID NO: 5435 - DNA, 557 bp, Homo sapiens
  misc_feature 483: n = A,T,C or G
ggagtaggatagttgtaatccctttactataccactgagttgattgattaaattgaaagttatgagtcaaatgcccccagagcatcttggaaccttcctgagtctgtgcatattcatatggtcctaatgaccttccactggaaggaaaaagtgtgtgctgcctgcagggaacacatgaagaaaggcttaggacgaagcaaaactttttcacaaccaccagcaagagtttaattaaactctgtctaacattataagcttgcctcaatttaagagcaaaatgtaccaggtttttcctgcacatggagcctcccagggtcttgcagctcaagaagcagaaggctttcattttacatctggctccttgaaatggggctaagaggctttctggagggttttgctggctgggacagttagtgtttacagatgtgagtggctttcagtcattgaatgtaaattgcatttgctttgttgcacacaccctgngaaaaccaagaggaagaagagaaataatgttcctttatccgcccacacacattgacattcaaggcacagtcttt

SEQ ID NO: 5436 - DNA, 640 bp, Homo sapiens
ggacgaaaacattccatctataatactaagactcatcataattaaaattctgaaaactaaagatagagggaaaaagatctttaaaagcaccagagagaagttatgtattacctataaagaaaaatcaactcaaatgaaacgacagcagatttttcatctgaaagcttgaaggccagacgaagtggcacaacattgatcaaatgctggaagaaaagacctggaaaccccaaatcctatatccagtgaagctatcttcaagactgaaggggaaatacacacatttttttaaaatgaaaaaaaagtaagaggatctgttcctagaagacccacctatcctgaaagaataggtaaaggaacatatctgtaacagaaaaataatattaacaaaaggctgggtaccttcagaaaggaaataacaacagggtaatgggcaaaagtagaagtaaacataacagacaatccctcacttcttgagtatcttaatcatactttattggtttatttgtttgtttgttgttttcttgagatgagatcttgctatgttgcccaggctggactcacactcctgggcttaagcaatcctcctgcttcagtgtcctgagtagctgagactacaggcattcaccaccattcctatcta

SEQ ID NO: 5437 - DNA, 600 bp, Homo sapiens
atggaagactaagtgtctaaaagcactcctcctacaaagcacctagaaatactagataaaacataacattctctgaaataaatagctgagctcaaagaatatgagaaaattccctctagggcaaagtgcaaagggaagttaaaactagatcaataaacatatgaggggatgttactgcagcccagaatgatgaaggtttgccaattttattaaacaattttaataatctcaaggcttgggatttaatatccaggagattaggtcttggacccttgtaagttgaaaagtaggaacttagagacccacataaaatctataccctcctttaagataaaatgataggcaagaaaaaaatattcccattggcatagggaaattacaaagaaagttgttttggcctgggttctgaatgaaaataaagttctcccctgagaatgtgtaatcactgcctctaacacatgggtttgcaaattgaatccattcctatgtggccctggagcatccaagcaaatgaattaacattaaaagaatctggagacagtgatatgcctgggaatctgataaaagcaaaatcaaacatcttatgaaggataaaccctc

SEQ ID NO: 5438 - DNA, 613 bp, Homo sapiens
tgagagggacctccctgaaccatgagttttcctcatggagaataatagagcaaggtgagcaaccagcttgccgagtcttttggggcaggtgtttaaagatggctaggaacatgaagtgcaggggctatcagtatcagccacacagttgctgccactggggaccacagcagcctttattgctgagaaccttaatagtcattacagctgccacaaaccccccttggcccccaaacaagagaaggggatactgctgtgccagcccagactggagccaccagcatccttgacctcctgccactgctgccacaaacatacctgggcatggcccacccatgcatacccatgctcctgaccctagctctgtggctggtctgtgagcagctgtgccttgcacacttgtgccactgctgtaatgggagcctgatccttggccactggtgccactgccaacacaagtgtgcccacgttccaaacctggtgccaaaaggaatcccattagccattaacttctgccgttagggaaaagaaaacaagtggactcatggagccttcaccacagaggactccaacagccctcaccaccactgcacgcacccacaaccttggccactga

SEQ ID NO: 5439 - DNA, 615 bp, Homo sapiens
aatggactttcctagcctctaaaaaattagtgatgcaaaaaaagctattaacttctaactggatctgtgctctttacacttgccccagtacagtggataatttctagtaccaacctttccttatctacttcacttgtaatgtacatgcctgtcaatgcctagcctgattaactgatttttgttttttagagttgggacactcattagaaatgcaagatctcaggccttatctcagacctactaaatcacaacttgcatttttactatatcgatgaatgatttgtctgcacgttaaagtttgagaagtcttgccttgacaccatggctgcacattaacaagctatggagctctaaacactgttacctgtaccccattctagtggaaccaaatctttggatgtgaggtctgtgggggctaggcatctgtttttttcaaagctcccaggtaaaacttaaactcaaattgtctggtagatgaccatctacgtcagaatgagataacaacgcttgtgtaaatgcacattcctaatctttctccagagatttgaattcttagccatagtgtaagtggttgaaagttcccaatctatcagctcacagcacacagtaaagcta

SEQ ID NO: 5440 - DNA, 491 bp, Homo sapiens
  misc_feature 416: n = A,T,C or G
ctataatacaatgaagaactttagagctgtttataaaaattgaacacacttattacagagaaaatgaaacaggggtcagtgaatttgcttaaggtaaatactacatgactatctgttaaaatgtaatggaggccgggtgcggtggctcacgcctgtaatttcagcactttgggaggctgaggtaggcggatcaactgaggtcaggagttcaagaccagcctggccaacatggcgaaaccctgcctttactaaaaatacaaaaattagccgggtgtggtggcacgtgcctgtaatcccagctactcgggaggctgaggcagggaaaatgcttgaacctgggacgcggaggttgcagtgagccgagacggcaccattgcactccagcctgggcaacagagcaagactccccgtctcanaaaaaaaaaaaaaaaaaaaaaaaaatttttgggggcctttttttcggtaatcccaaacttaaaaaaacccttggg

SEQ ID NO: 5441 - DNA, 613 bp, Homo sapiens
gaatattagtaagttgcttaactgggtaaagaagtagcaacttaaatatatataatccattatgacacagggcttaaaggccagagagaaaacatactgtttgggacctatagttttatactctgttgtttcaaatctcattatttatcaagaagtgtaaagagccaaccaaggtgattaagggggaaaagacttctgaaccaaatatgtttactcatcactctgaagtacatgggcttatgcagaaatgctaaccctgctacaaatttacactgttcagcaaatactgggtctctatgttttgtttattccaattgtgtcctttagtctctgagtctctgaaagcatggtacaggttgaatgtagccatctgtgatgtcctgtctgatgtatcagagttatcttgacaacagacagcaaagttatagatgtactttgtttcatactaatctggtattgagacctaaggaaactagaataattataaagggcagtttttgaagaaattccccatgctatgtttaaccaggttgataatgacagaatttgcaaattaaactaaattaaaaaatttctaaggttataacatttatactaagatctgtgattcctt

SEQ ID NO: 5442 - DNA, 562 bp, Homo sapiens
ccaaattcccagaaagggctcacggtctcagcctgggatggtgcagttacctgcagggatgatggaagattccagtgggaagaaggcaatgcctgactgccatccactgacccctgctacctccaacatccaccaagggaaccatgggggggaagaagacctgggagttccatgtctgtgctgctacccacgcccactcccaccctagcaggtccagtcagtggggactgagggatatgagggtaaaagggtggaaaaacaggttaatggtccaggcacagtggctcgcgcctgtaatcccaacactttggggggctgaggcgggcggatcacttgaggtcaggagatcaagaccatcctggccaacatggtgaaaccccatctctactaaaaaaatacaaaaaattagtgggcatggtggcacgtgcctgtaatcccagcgactcgggaggctgagccaggggaattgcttgaatctgggaggcagaggttgcagtgagctgagatcgtgccactgcactccagccggggtgacagagcgagacactgtctccaaaaaaaa

SEQ ID NO: 5443 - DNA, 527 bp, Homo sapiens
ttgtcatcttgagaatctagtcaagtttagattttagaaaatgttttccagtgaagttttttttagggtctcaggtttatttttttctttatgtattagttttaagatgggctttacattttagtaacataggggggtgttcttaaaatatgtaggttaattgtataaattataaaatttgcatagatacaaaaacacagaaaaaaacaaattatccatgatgctactgcccagaggaatctttttgatactttagagtatgtactttcgtttttttttgttttttagagacggagtctcgctctgtcacccaggctggagtgcagtggcgtgatcttgactcactgcaacctccgcctaccgagttcaaatgattctcctgcctcagcctcttgagtagctgagattacaaacacgtgccaccttgcccgtctaatttttgtatttttagtagagacggggtttcgccatgttggccaggctggtctcaaactgatgacctcatgaaatccgcccacctcagcctt

SEQ ID NO: 5444 - DNA, 620 bp, Homo sapiens
ttggctctatctcttctgtgggaccttggacagttcattcagcctatctgagccttaatttccttttctataaatgacaatttttagagtagatgagcttcaaatttccttgcagtgctgtagtgctttggttctattttgttaaagattctgctgcacattaaaaaaagtgacaaggggccaggtgcggtggctcatgcctgtaatcccagcactttgggaggccaaggtgggcggatcataagatcaggagttcaagatgagcctgaccaacatggtgaaagcccgtctctaccaaaaatacaaaaattagccaggcatgatggtgcacacctgtaatcccagctacttgggaggctgaggcaggagaattacttgaacccaggaggaggaggttgcagtgagccgagatcgccctactgcactctagcctgggcgacagaacgagactctgtctcaaaaaaaacaaaaaaaacaaaaaccaacaacaaaaaagtgattaggccagatattatggctcatgcctgtaatcccagcactttgggaggctgaggtgggtggattgcttgagcccaggagttcgagactagcctaggcaacataatgagaccttatctcta

SEQ ID NO: 5445 - DNA, 627 bp, Homo sapiens
attacgctgctgctggtcttgtcctggctcatgggactcctttcctgggtcacttacatcatctaaatccgcactgcccacacctggacaccatgtgctttgattgccactgaatgtgcagctccttcttggatgcatgctagcctgctacaccagtgctttttttggtagcagctggaactgggtttgtccctatggtacctgttcctggccttctcacttggctttactagtaacttaccatgccctgttcattccagaggaaagtccctgttcctaatggtattctttggcctggaatgccctctcatcgctcctacactcctccctccctcaagctcggctcaaaatttatttcttctgtgagtatttcttgctcatttcagacttcacaactttcagtaggaattaaacaaatatttgttgaacagatggaggtacagtatgggatagacaaagggcagccaggatacactgaaggcaaaaggaggggccaggtgctatggctcatgcctgttatcccagcaccttgggaggccgaggtgggcagatcacctgaagtcaggagttcaacaccagcctggctaacacggtgaaaccctgtctctactaaaaatacaaaaactc

SEQ ID NO: 5446 - DNA, 559 bp, Homo sapiens
agagttgtaggttgtgttagggcattattgtgttgctataaatacttgaggctggataatttataaagaaaagagttttaattggttcacagttctgcaggctttaaaggaaacatggtggtggggtggtatctgcttctagtgagggctcggaagctgacaatcatggtgggagctgactagcagccagcatgtcacgtggcaagagcaagagagaagggggaggtgccacactcttttaaacaaacagattccccatgaactcggagtgagaactcactcattatcgcaaggacagcatcaagccattcatgagggacgcacaacccccatgacccaaacacttcccactaggtctcacctccgacatcggggattatatttcaacatgagatttggaaggaacaaaacacccaaacctgtcatagatgtacatttttcttctagtttgaagtgaaaccaggagaactgtgatgtacatagaggtttaagaatgagaaaactgaccatggaagttatttgaagcatttgttatatatttcagtatctatagagaatc

SEQ ID NO: 5447 - DNA, 539 bp, Homo sapiens
tcttaacttttctgaacctgtttcctcttttctgaaattagaataatccctccttcctagagatgttagcggaaggattcagtggtctacccttggattggaaaacattgtctttagagggtcatattgtaaatgttttctgttttgtgagtcatatagtctctgacactgcaagagcagccttagatagtatgtaaacaaattagcatggtcatatatgcccaggcagcgggtcaaatttgtcccccaggctactttgccaacgctaaatataaagctgttagcacactgcctgtatacagcaggtaattaaatgattccctaccaccaacactaccccctagttccatcgcttctggcaactgcataatcatcaagaggtagactttgggccgggtgcagtggctcacacctgtaatcccagcactttgggaggccgaggcaggtggatcacttgaagtcaggagttccagaccagcctggccaacatggtgaaactctgtctctactaaaaatacaaaaaaaaaaaaaaaaaaaaa

SEQ ID NO: 5448 - DNA, 448 bp, Homo sapiens
cccagggaccacagtttggatatgcttggcatagttgctaaaaatgtattgagtgatacagttagcatttgtgcgctttatctagccaggctctctagcttttgtttttgaaacacgtatgcagtggtttgtaacacacattgggatttttcaaggacaatttttaaaaattactgtttgttggacaggcgcggtggctcatgcctgtaatcccagcactttgggaggccaaggcagatggatctcgaggtcaggaaatcgaggctatcctggctaacacggtgaaaccccgtctctactaaaaatacaaaaaaattagccaggcgtggtggcgggcgcctgtagtcccagctactcgggaggctgcggcaggagaatggtgtgaacctgggaggcggagcttgcagtgagccgagatcgcaccaccgcactccagcctgggagacag

SEQ ID NO: 5449 - DNA, 532 bp, Homo sapiens
taagctcatcaccatttctgttactgtgaatctgatgcttggcatttggcatcagctacagagtgcagggattcggtacaattttaacaattgtagagaatggccctaaaaataagaacttgtgggctggaatcatgttttatggggcaagggaatctgggaaggaaaacaggtgaaaaataatgaagtggggggagtgtaattatcaaaaactttgagggtatcacacacttggcagccttatcaatcaaggaaggaaattaatgaaaaagttaagaactctctacagagaatacatgatgcagttagtaattttaaataggcatggttaggtcctgtacagatttgtatctgatcctcttagggggtgcggctacccaaggctgcatttttcatcctgtggtattaccttacctgaatataggactccagctctagatatcccatctataaagtcaaaataaaccttctcactgggtgcacacaaatattcttctaactgtagcaatgaagaaggggtcaaacagatgga

SEQ ID NO: 5450 - DNA, 611 bp, Homo sapiens
  misc_feature 558: n = A,T,C or G
atattgaggactttggaaatacgttgctttcaatctaaaataattaatataccatatatttaaaatgacttttagtggatatctactgtctatgagaataacatcaacttagttgaggaaaccctcagaaaaattatatgccaggacagcttagttctattccttatggtacactggcaacataatagcaaatgaataataaacttagctgtggggaaagacaggaaaacctttcagtcattcatggatgtaaaaaacacaggcatgctgattatggtgtcttcgtgcacgaatgctgtttcaataaatttttaaaaattgtggcaacatcagaggtttgtaaaatggcaggaaaatgaggttttgaaagataattccaatagtggagtagtatatggttttattggaacttaaaaagattgcctaaacatgaccttagaggaatacataatctagaaaacgcatactaataacaaatgtgtatgtggttgccttgtatttggtactagaatatggttcttagcttctttgtgggagaaatctcatgacttgatgcanattataatgctggtaaaagtgacactatttcagtaggaattaacaattttggg

SEQ ID NO: 5451 - DNA, 597 bp, Homo sapiens
gacgacagaggggctaagtaccattcgggggggggagccactgggttcagacgtgctgcaaaattaggctccagacaagtttttctgattgcaatgctgctctgagcaggccatccacacctaccagtgaatcgaattgctctcgcgggcaagcaaacaggcgtccattaatggtgagcgtggtggaatactgaaacatcattaggtttgagcaccaccttttctgtgaacataaaaagcatgagattgcctattaaatacatctgagatttgctgcactgccctaatcacaccaacaaattgccagcttggtgaattaccggaacacgcagagtgactgcataaaatagagtactgaagggatccacggaataaaaaagacggcattcatgcagccctgcgccactcaggatgccttcagaaatggccacaaaaaggaatagagatgccagagggtcaattcacccagttttgtgctgcaaccataattactgagcacataaaacccgcacttgctatttatctcacaagttatgtttccagatggtaatcacacccaggactttggacatagaaagatcactttttaaaaacttt

SEQ ID NO: 5452 - DNA, 508 bp, Homo sapiens
cctgatgcacatatgaaagacgttttcctagagcatgtacctaggagtgtagttgctggttcaacttgatgagatatttccaaattgctttccaaggaggtttaccaatttgctctggtattagcaggatatgattctgcatcctttataaattttaaaaaaaaagtgttttttttgactgggtaaaactttcaagtgctgcaaaattcaaaactattaaaaaatggaatgtaggccaggcgcagtggctcatgcctgtaatcccagcactttgggaggccgaggtgagtggatcacatgaggttaagagttcaagaccagcctggccaacatcatgaaaccccctcactactaaaaatacaaaaatcagctgggcatggtggtgcacacctgtaatcccagccactcgggaggttgaggcaggagaatcgcttaaagctgggaggcagaggttgcagtgagctgagactgcaccactacactccagcctgagtgacagagcaagatt

SEQ ID NO: 5453 - DNA, 682 bp, Homo sapiens
gcagtctcggctcagtgcagggtccatctcccaggttcaagtgattctccttcctcagcctcctgtcccatgcctggctaatttttttgtatttttagtagggacggggtttcaccatgttggtcagtctggtctcgaactcctgacctcaggtgatccaccagcctcagcttcccaaagtgctgggattacaggcgtgagccaccacgcccagcccacacttcttcaatatttaataaatgtataatatattttcacgacaccaaggaaatgctgctctcatttctcatttcaaaactatcctggacgtcctcacatgtacatgtatcattttacaaatgaattcaacatatacatataattcaacatatataatgtcatacatatataactgaattgaattcagtgtccatatatgctaagtacttagagatgttggatttattattccaggaaaagaaagtaaatttggttaagtttcaacattaaaaccctgttgggatttcaataggaattgtgttgaattcatttaaggaagactttgccatgggaatgaagtctactcacctctcaacaagttaaagatatactatttacatgaagtggctgtgattagattataaaagtaaacaagctaaatgcatatggagaagaactggaaataatttttttaatttactcc

SEQ ID NO: 5454 - DNA, 569 bp, Homo sapiens
atatgctagcaggcgggtgggggcctgtgcaatgctctgtgtggggtggccctgcctgccactggcagttggtttggaaatgttgcagtgactctcaggagtcatacttctctccttccctttctatataattgtaaacttacagaaatttccttcacccagagtcaccattgatattttccctccatttgctttaatattttctttctgaaccatctgagagaaagttggagatacaatgccttcttactcttaaattttaatttcagtgtatacttccccaaaacaaggccactttcttacataagcacagttataaaactcaagaaattgggccaagtgtggcggctcacacctgtaatcccagcattttgggaggccgaggtgggaggatcacttgagcccaggagtttgagaccagcctgggcacagcgagaccctgtctccattaaaaataaatttagccgggcatggtgtgtgtgccatgtagctagtagtcctagctgcttgggaggctgaggcagaaggatcacttgagcctaggagttcaaggctgcagtgagccatga

SEQ ID NO: 5455 - DNA, 568 bp, Homo sapiens
gaaaaccaggaaaatgtgctgaggagtcaagagcagacaatgtttcaagaagtcctaacagcattaggcatacacacacacacacaaaatcaaagctacaatactacggtattcaatagaaccatatgcctcagatataactcaatccctttatcccaaaatctaattccacttcttacagtcccaacctgatgaatggcatcacccagtcacctaatccttctccttcacccgtatcaatacaccattaaatccaaaagattcaactcattttatatcttttatttcttatctgttctttcctccatatggcttccaactaaattcaggtcttcatctctcagcaggatattgaaataatcccttatttgtacccctgccccttggcttagtctggtacaacccatcttctaccttggtgccagataaaaatgtccaaagtatgtatttgattatattactttctctgttaaaattcctcaggacctaaagtgctggtttctaggcattgggatttcatcgctcagtaactcccccttaaaaaaaaaaaaaaaaaaaatttttgggg

SEQ ID NO: 5456 - DNA, 603 bp, Homo sapiens
aaacttattctacaagagtagcgcctaatggccaaaataaggtacatttggatatgcatatgcccaaagctatccatgacaaacataaaatttagtggaagctttttctgctgaaatttatgaaaaattcataatgcatgccatgaaagactctctttttaaataaagttacttctcatattataaaactgatgaaactattcaatttttatccaaaagttttgtgtagcttcctgggagttttccatactaatgtctcattatactacagaatttccatgggacagactggcttcactatatgcagcatactgaaaataagagctgtactccagaataatccactatagactaataatccattaattttattacatcactgttacacctgtatagcattagcttatattgtctcttgaattaataaattattctggaaaagtaattaaccatctcatgtttattattttgacaagttaactccattgcctaaacttctatacttaaatattaaatagtaaggaaggaactgtctggtagaaacaagtgtgtgtgtgtgtgtgtgtgtgtgtgtaaatttaaatgcatgtgcaactctacgta

SEQ ID NO: 5457 - DNA, 405 bp, Homo sapiens
caagaatgatctacaacttattttgagaaataaagtagacaaaaaggaggaagagccagtattttggaagaaagcagcaaagacacaaaagcatctccacttgggtacaggacatcttgtacttcacagatttgattggcatagagggagcagctttcagccagggtctgaagacctatggctttcactccaacctgggccactttggtgttttccccctctgttttaaaaatatactgaggccgggtgagttggtcggatcacagggtcaagagatcgagaccatcctggccaatatggggaaaccctgtctctactaaaaatacaaaaattagcttggtgtggtggcgcatgcctatagtgccagctactcaggaggatgagacaggagaatcacttgaaccc

SEQ ID NO: 5458 - DNA, 637 bp, Homo sapiens
caagttattggttgggtgccggacacatgaatttcacacatcacttgtgttatttcacaaaagccaaacttagggagtaaaagtatcttttcttagccttataaaatgctgaagaatgcctcctatttggccccttctctgaatatttatgattcactgaaggtctttcccctaagtgccttttgaatcacatttaataagtcttcatttatttattcatagcaaacatttattgaatggcaatatatcgatgctgggatataggtattaataaagcatggcctccaccctcagggagctcagagtcaaatggatgaatcacatgagagtggtgaggttctgtgctgagcctgcccgcactgccccgccttgccccgggcacacccactgagggccactgctgcaagtacctgggctccttcctgagggctccctccggctgccaaggtccatccagcctatgaggctggtggggcaaagggagtggggttagcacccctgggagcagcccacagacttggtggatgattacccagcatccaagtcaccagcaggtcggagggatgaagatacacagaagccaaacagtgccccgatggaagctggaaacctgccatttaagggatagtcgacagga

SEQ ID NO: 5459 - DNA, 471 bp, Homo sapiens
tttcacttcactgagctgtgttgtgagggaaaaaaagatgatttcatttttcagttgctagcattaacagagagatatctgctttgcagctcttcactggtgagttcacagtgtccttgcatctcaacaactctttccccacagtaggatttacatggtaataatttattcagaacatttgaaatactgtttcttttaaaaaacaggtcactggaaaacactgaaatcagacaaggcattaaaacaaatttaatgaaactttcaacaaatgaaactggcaggacacaaggctttgcagcaggaatagcagcctaaactgcttattaggataatctcctgctgagcattttacctcttatgttgctttttgtgtcccctactgtcttgtttttgttagatacttttaacacattctgtactgcctgacaaagagaaaaaagggggcaacccaaaaaaaaaaaaaaaaaaaaa

SEQ ID NO: 5460 - DNA, 472 bp, Homo sapiens
agtggctacttttctgagttgtggcaatttcttaagcttagagacaaatttttaaccctgaatagttttaggcaattattttctttaagagacagggtctcccaatgttgcccaggctaggcttgaactcctggcctcaagcaatccaccctccacagcctcctgaggagctgggattacaggcatgagccactttgcccagcagttttgggcaatttttatgaacagaacaaaatgaaaccaaggatgacagaataccatactaggctcagaagatttggactgtggctccaactctgctcttggacaaatccctaaacatctcagagcatcagttttgcacctggacgacgagaagctggactagataaatccaggggccctcctaggccaagggcccttgatcagggaggccagcccccctgcctgtgacccacaaagtctcagggcacagggaaacagggagaagcgc

SEQ ID NO: 5461 - DNA, 600 bp, Homo sapiens
tgcagctccgcttcccgggttcacgccattctcctgcctcagcctcccgagtagctgggactacaggcgcccgccaccgcgcccggctaattttttgtatttttagtagagacggggtttcaccttgttaggggggatggtctcgatctcctgacctcatgatacacccgcctcggcctgccaaagtgctgggattacaggcgtgagccaccgcgcccggccatagtgagccctttctatctgaagaattataaggcttttttcagctttgtgaataatgcttttatcatttcattgactatttccacccctctatcttaactatcacctgcctctggaaatcctattagaaagacgttggtcttcacagatcttaaaccccaagtttctaatttcccaaattatccattaatcagttatactgtacattatatatatgaatattctgggaggtttcctgaactttcctttcaaaaatcagtctttggctaaatctattctatttgttggcccatatatcaaatgttttgttatgaaatcattctaattcttggaaagagttttaactatttcaatattattttgaatcttactttgaaa

SEQ ID NO: 5462 - DNA, 533 bp, Homo sapiens
gcacactgacttcctgtggttcgactagcaatttatttttttcttccacaatattctacatattagtccttgtatacttcttgacttttccaggtttgtctatttatgtaaactgcattgccttacaaattattattttaaatttattttaactttatatcttcatctaaaccataattcattacattctaaaaaatatcagaactggtcactaatcattttcatgaaatagtgtccaactacatgccagatagtaattctaatccaaatatttctgcaacacagaaatttttattttcacttgacagattaaaaactgaggctaggccaggcacagtggctcatgcctgtaatcccagcattttgggaggtggaggtgggcggatcacctgaggttgggagtttgagaccaacctgaccaacatggagaaaccctgtctctactaaaaatacaaaaattagccaggcgtggtggcacatgcctgtaatcccagctactcaggaggctgaggcaggagaattgcttgaaccca

SEQ ID NO: 5463 - DNA, 581 bp, Homo sapiens
aagctaaataaagggggcttggggatggtcataaaatcaaataataagaaaaataattgaaggaaaaaacggcgagaaatgccaagcccattaaaaaagattttaaaaccacagaatgtaactgtactactttaattccgttaacattcatggtaatgtattacaggcactgggaagttcagtaagcgttcacatttataaaatacccaatctatcagactgtatttacaccacgaaaaatgacctgtattagaaagttctctaagaactttaaattttctccagtttgcccatttagaggaaaccctatataaaggaagagatacacagatatatttcgtccattccctaatcaactcaaacggaatttgggactcttctgtaacacagtcttcttaatttgttaagggatacagtccaaattctaataattactgtatagcaaaacatcaaattgagtaaatatccccctccctaatttttcctcaacaaaatgctacaaggacatcaaaatatcaagcctaacatgttaattatttgtattatgaaaattgagaaaacacaaggatatcataggagag

SEQ ID NO: 5464 - DNA, 413 bp, Homo sapiens
  misc_feature 1, 2: n = A,T,C or G
nnatcaagagggtgtgtggaatataagaaaattacatcaattaataagacatgaagcatatttctgtaaaaggatttgtaaatttgtctttcaccaaatttaaatgccctatatatttgtcaacagcctatttaaacaacagaaaattctatgaagtcttcagtggcctattgctctgcttttgaatttcttaggtgcttttgcttttcttgttgtctgtcttttaaatcagtttatgtctcatttatcaagcacataagtgagataaaagcagatgatcagctttattaaccctaataagaagttgcttgattggaaaaaaaaaaggtggaattaacattaaaatctggtggctcttcatcatcattgtttgtggatttcagctttttatttctttcttcagtagcaaaagt

SEQ ID NO: 5465 - DNA, 642 bp, Homo sapiens
actggatgtgttattatttgaaaacttgctcaattctagagaggttaaaatcatttatcaaaggaagagtggaaagagaggactgacattggcaaaaccatgttgaatggaggattgaagtagataaatatgatctggctgctttagcaattattaaagattgcagaaagcagtgtagcatagtaagaacgaacttcaaaatcagattggctttgagtctctcgttctgccacttactggttgtttgaccttcagcaagttatgtaactctcaaagtctcagtttcttcctctcaaaatcagaaatagtaggagtaactaattcttagtgttgagaagtgaatgagacagagcatgctgagataaattaaattctcaataaatgttgactaaaacaaacagccataatgatggcccacacgtaattggaaaagtttttatattaatatacatacattttggtcaaaattttacttttaattagagataatttttgcagaggaatttttctaggtgtgacattcaacttagagtttccgcccaactatttggcagcttctctggaagcagagtataaatgataagtagttcactgtcccatcagttcctccaccacctaattctaccatctgtcctcccatct

SEQ ID NO: 5466 - DNA, 631 bp, Homo sapiens
agtaattggatgagttctcttaattgaatgcaatagagaaagcgcaaattctggtcttgcttctgatatgcattaatactacataatttttgaacaaccttgagacaagaagtgacagacgtaagactggaaagctcccagatcatcctcaaaaagagaatagtctattcaaatactgctttcagaatagcataaattgttacagtagatcacacaataacaaaagaataatcagagtaaccatctccaaaaatcttactaaattgggtgatataaaaaagaaaagaaagcctgaagaagtaattttggtttaggtcataaaattaactaaagagctgagggactgttaaagtccagaagccatgtgtaatgatggaagacttttaaattcctggcaaattttcaagacacataaaggaaaattaggactgttcctcctaacagattttaattataaaagcattttattcaaaattagttgaattattttaccctctcttgtatattctgcaattaattgatgatctattacagaacacttggttcttctattgcttttcacctaaggatctctacatattacagacattttaaaagtaactgaagacctaagctcatttgggaaaaaaaa

SEQ ID NO: 5467 - DNA, 567 bp, Homo sapiens
taatacctcaccttatgccctaattgtatgcctctcagctcctgggatgggtttgctggcgagcttaactgtaggagcacacttaatgctgatacaatgcctataatgtacaacctggaatcatgaatcactggatctctttgactagtacaggagagcaagtgagtttgaaaattacttggagctcacatgtaaaatgttgactacattgtggccacagaattggattggtgcgaccaggatgggcctaaactcctgccaccatccagatgcaaacattgctattgataatgaatgggtaacacaagggttttgagatggcaacaaacctgtcataggccataacagcaataagaaaacactcggctgggcatggtggctcacacctgtaatcccaacactttgggaggctaaggcaggcggatcatgaggtcaggagttcaagaccagcctgaccaatatggtgaaaccccgtctctactaaaaatacaaaaattagctggtcatggtggcgggcacctgtaatcccagctactcgggaggctgaggcaggcgaactgtttgaac

SEQ ID NO: 5468 - DNA, 556 bp, Homo sapiens
cccaaagtgctggtattatgggcgtgagccactgcaaccggccccactgatgctttctgtgtcatttaaagctacataagaaaaccagtcttgttacttttatagtcattccacattttacaatactactgtttgatctcctctgatatttatcatacatggctttgaattactgttgaaaactcagaagtcatatcaattctcaaaacatgaaggaaaaatatgcagctggatctattctgaaagagcaatttttaaaaatgttttgaagccaggtgcggtggctcacgcctgtaatcccaggcactttgggaggccaaggcgggtggatcaccggaggtcaggagcttcagaccagtctggccaacctggtgaaaccctgtctctccgaaaaatacaaaaattagctgagcatggtggtgcacgcctgtagtcccagctacccaggaggctgaggcaggagaatctcgtgaacccaggagacggaggttgcagtgagccgagatccagccactgcactccagcctgggcgacagagcgagactctgtctccaat

SEQ ID NO: 5469 - DNA, 561 bp, Homo sapiens
cgacaaacatttccctatgtaacaaacttgcacatgtacccctgaactcaaaatgaacatctaaaaagatatatatttacatacacacacacacatatataatttcatgaatgttatcagtttatagcagtatatggtaaatctacgtatatattttaatctatgctggattctagtgaccacttctttttctaagtatttaaattatatataagatataccaatatcatatatttcatcatataagtttcatcacattgagctataattcaaagaatttgctgtgttctattacctgtgaataaatttcctgtttatattttggctagctacgcactactcctcaattactaatacaattggctcttgcacaatgcggaagttagggaaactgacctctgcacagttgaaaatccacatataacatttgacttccccaactgaactaatgaactactaatagcctattattgacccaaagtcttgtatatatacagttgattaatacataatttgcatatgtattatatatggtagtcttacaatagagtaagacagaac

SEQ ID NO: 5470 - DNA, 537 bp, Homo sapiens
gttcttaccacgtacatagcaatcgttaaaatagcagtatttaaacttctgattccattgtctttaagttctcaatatggttgagagtcaaaatgtctggatttaaaccctggctccactgcttatgagcaggttgccacatctctctggatcttagtctcctcatctgtagaatgagagaattgaaagcatctaccaactctgagttgcaatgagaatgaaaaatgataaggcatccaaagtgcgcagaatagggttgagcaggtaataagaatacaataaatgtgagctatattattatcaccccaatgtatgtttctgttagagtcaagcttattgatttcacagggctgccatgaaaactagatcatgtaggcagaatgcctagcaaagggtctggcataaaacagacatttagtaaatagtcccattctgcaccaaatcactcctccctttccatgcctccttgcttcatttgaagagtccttttcctcatatatttttccttttctgtattgactactatactacaattct

SEQ ID NO: 5471 - DNA, 601 bp, Homo sapiens
tgccaaaatttaagttggatgggaatgttaatgtcctacacacgatattatttatggaagtaataatgtcaaactataattttttgatgtcattgttatatttaatcagcatgggaggacatgacttgttgatgaggttttccctggggaaagaaaaaaaatacttccagcataaatatactgaaatgatgcttaattttggaagtgaggtgagaaatggggaagccagacttagattagatggagaaaaaccttttctcttagaaatggaaagatagttgaattcctagactatggctattttcaaaagtcattaaccacccacaacatgggaaaaactcatctaaaacaattcctgatgttctttgcccttaaaacttacttgggatcagtgacaactaatccttccaatggttcagtccaatagacttggagccgtccagattcctttcctttactcacattgtacatccagtctgtaagctcttgttattctatggagacactaaataaagaactagaaactgactaaaataactttaattatttcactgaaaattagtcaaatatctacagcatccaagagagcaccactcaaaaa

SEQ ID NO: 5472 - DNA, 345 bp, Homo sapiens
acattaaccttgcaagactgctttggacatatgtattaaaaacatatgcatctgatcttcatgtactagcaggggggtgtatacacattccaagatttaaagtgaaatatggttctcttatcaaataatctcctaggctttgtcagtggagtgcttaacaccaggctagtctcatactagaggtgtaattgtttttggaatttattggaaattgagttcctttaaaattctagaacaatagtctctacaaacaaacataatggaatttaaacacacacacgtacacacatgcacacaaatgcacgcatgacatgttatgggatacattttaacagttttagagtt

SEQ ID NO: 5473 - DNA, 588 bp, Homo sapiens
ttttgcaggtgaggaaactgaggctcaaagaggtgaaatgatagttcaaactcacataagtagaacccagcatggatgttagcatggtattattattctttgttgctgttgcattgtttctagatgaggaaaccatttctaaggggtcatggagctcagaagtgcagggctggggtagccatccaggcaagcactctccaacagaaatacaacaagggatcagggtgctgtggctcatgcctataatcccagctctttgggaggctgagacgggaggattgcttgaggccaggaattcaaggctgcagtgagctatgatcgtgccactgtgttccagcctgagcaacagtgaaaccctgtctctaaagaaaaaagaaaaaagaagccaagcacggtggctcatgtctgtaatcccagcactttggtaggccaaggtagggggtggatcacttgaggccaggagttcaagaccagcctggccaacatggtgaaacaccaactctactaaaaatacaaaacttagccaggtgtggtggcaggtgcctgtaaccccagctactcgggaggctgaggcaggagaattgcttg

SEQ ID NO: 5474 - DNA, 559 bp, Homo sapiens
gctgtgtaagagatgatttcattctgtgttttattaccattttttacacattgtctctcaaacactagattttcatatcctcagtcacagaccatggttccatggtttatacatcattttgaaattttttattgcattttagagccaaggtctcactctgtcatccagcctggagtgcagtggtataatcatagcttactgcagcctcaaactcatgggctcaagcaatcctcctgtttcagcttctcaagtagctaggactataggcacatgccaccatgcccagctaattttttattttgtagagatggggtcttggtatgttgccagactggtctcgaactcctggtctcaagtgatcctcccacatcagcctcccaaaatggtaggattacaggtgatgacaagattattgatggtttgtacattttttatcatcttgcttccccagccctgtgcctaatactgtcagtaattattattgttacggctaattattgctgcatgcttactttattgtaagtactgtgcttaagctaatagcatgtgttattaactt

SEQ ID NO: 5475 - DNA, 593 bp, Homo sapiens
tacctgaggcaggccagggactagggaaggtggcagctggacaaaggtatgaaggaaggacgagatgaggcacaggtcctggtattggaaagaggcagaggtacctcggaagcatgccatagaggttagacgggacctaagagggcatctggtccaaccggattcgtgttaccagcgagtaaactgaggccaggagagggactgctacgagctgctccagcctatcacctataaagactacagtccctttgtaaaataccatacagctctcggagaactcccagttggcgctgcaggataaaatccaaacttgttggcatagcattccagccacttgttcacttacctttcccatttgagctcctaggaataaacagaaaaacatttcattttctaaatatcaccagataacttcacttttggtaacttgaattattaaaaaagtcctaccgtccctcatctcttgccacttccccaacattactggaggctctggctacaaataatttgttttccttgactactcaactttctttggattatttactttttctctaagtttctttactcctttttgctttgttcattctttt

SEQ ID NO: 5476 - DNA, 499 bp, Homo sapiens
ttggaatacaaccatgccagtttaatttatgtattgtatatctcagtttttatactacatcagtagaattgagtagttgaaatagagaccgctggcctgcaaagcttaaaatactctctagacctttatgaaaaaagtttgctgactcctactctagaagatagactgaaatgaaggtgaaaatatctgaaaataaaatacaatgaaaatgaataaaaaagttattgctatggtaagacaaattataaattgagctaaggaagtagcaacaggaatagagagcaatcagatgatacagaatttggtgactgactggatagatcatgaaggcaaggagaaaaccaagatgagtctgatgacagagtggaagttggtgccattaactgaggtaagaaccatatgataaacagtaaatgagtgtggatgtatgtatgcatggctgtattttaaaataaggattgggtggtggctatgtataagagtacaatgaaaatcatga

SEQ ID NO: 5477 - DNA, 582 bp, Homo sapiens
ggagtaggatagttgtaatccctttactataccactgagttgattgattaaattgaaagttatgagtcaaatgcccccagagcatcttggaaccttcctgagtctgtgcatattcatatggtcctaatgaccttccactggaaggaaaaagtgtgtgctgcctgcagggaacacatgaagaaaggcttaggacgaagcaaaactttttcacaaccaccagcaagagtttaattaaactctgtctaacattataagcttgcctcaatttaagagcaaagcagaaggctttcattttacatctggctccttgaaatggggctaagaggctttctggagggttttgctggctgggacagttagtgtttacagatgtgagtggctttcagtcattgaatgtaaattgcatttgctttgttgcacacaccctgggaaaaccaagaggaagaagagaaataatgttcctttatccgcccacacacattgacattcaaggcacagtcttttcaggtttattgggtccctaagcaacctttgaagagatctgtacatctgtccggctgtccctactccagcggacatgga

SEQ ID NO: 5478 - DNA, 627 bp, Homo sapiens
ggcatggtggcctgtgcccgtagttcccaccactcaggaccctcttgtcttctgagtagctggaactacaggtgcaggccaccatacttcagaggtgggaggatcatttaagcccaggaattcgaggctgcagtgagctgtgatcacatcaatacactccagcctgaggaacagctcatctctttaaaaaaaaatgcagttagagccagggatggcgggcttgtgcctgtagtttccactagtgagcctgaggtagaaggatagcttgagcccaggagtttgagaccagcctgggcaacatagtgagaccctgtctccaaagttactattctaaatggttattaatttattcacttctgaagctgatgaaatttaagaaactgaaaagtaaatataatgtggaccctcattatatactgtggataagagtgatataaaagaaaaattagataatgacacaaaatacacatttataatcacatgccaaactaggcaagaccacaagcatttttttggaaatgatttcaggttaaagtggagtggactggaggccgggtgcggtggctcacgcctgtgttcccagcactttgggaggccgaaggcgggcggatcacgaggtcaggagat

SEQ ID NO: 5479 - DNA, 510 bp, Homo sapiens
ggccgcgagaagagacagaagggaccatggaacatatgcgctttgtcctacatagtcagtatcctcattgctcctgagttttcttcagtggggcctaatagcgggagataaaatgatctagttgaaaagcagaggtaggagatgggtagctaggactgtcattatttctacataaagaaaccacaggggaaaaagagtgtctttggttgacttccggggagttgttgcactagcctaggatgagaaccacccttaaaagaaagctttgcatttttcaacacctcgattacattaaaaagtatttgggtcaacaaccgttagtattcatttgtaaagctttattgttttttaaagggaagcatatatgtaaggttgataggtcgataaacatttgtatgcacttacataaatagaaacactttatctgcacacacatcatataccaaatattaatatgtttacctaaaactaaaattttcccattaatgtttaatttagatttgaatatat

SEQ ID NO: 5480 - DNA, 529 bp, Homo sapiens
ggcctacggctggagagacacgagggtactccccttctcatgtgctaccctctcctgcccctcaacacacacctgtgttttaaccagatagaactacctggaagcttcttagaaggtaaaacctctagccctatcttcagacctatgaattgcactttatgagtatcccagggtattaaatatgcacattgaagtttaagaagcactggtctggctgggcgcagtggctcatgcctataatcccagcagtttgtgaggctgaggtgggtggattgcttgaggccaggagttcgagaccagcctggccaacatggcaaaacctcgtctctaccaatatataaataaataagggccaggcgcagttgctcacgcctgtaatcccagcactttgggaggccaaggtgggtggatcacctgaggtcaggagtctgagaccagcttggccaaccagcctggtgaaaccccatctccactaaaaatactaagattagctgggcatggtagcaggaacctgtaatcctagctactt

SEQ ID NO: 5481 - DNA, 586 bp, Homo sapiens
  misc_feature 508: n = A,T,C or G
cagccatggggagatgtgaccagttaggtgacaaggaagcaatggagctgcctttgcatttgaagctcaagattcatatgagctggtccttgccaagaaacaggtgcacactgaggaggaccagagtggtggtatgctagagctgtcatggatcatggcccacaagagccaattgctactttttcagaatgtttgcaaaccagttactaaatgtggccatggaaggctgggcgcggtggctcacgcctgtaatcccaacactttgggaggccaaggcgggtggatcacctgagttcaggagttcgagaccagcctggccaacgtgccaaaaccccgtctctactaaaaatgcaaaaattagccaggcgtggtggtatgtgcctgtagtcccagcgactcaggaggctgaggcaggagaattgcttgaacctgggaggcggaggttgcagtgagctgagatcacaccactgtactccagcctgggtgacagagcgagaccctgtctcanaaaaaaccaaaaatatgaataaataaataaatgtgaccatgattaaaattatataaacttaagtgaatattaaaatca

SEQ ID NO: 5482 - DNA, 430 bp, Homo sapiens
aggcaggagaagcttgaactggggcagcagacgttggggtgagcagagatcgcactattgtacttcagcctgggtgacaagagcgagactccatctcgaaaagaaaaaaaaaaaatgaaaaagtggggaaaggcaggtaaaaattaaaaaaactggaaactcttaagggaaaaagagaaaaccaatccagatattttagaaatcataatacagttaaaggggctaaaccatcttattaaaagatggatattgtcaaattggattttcaaaaaccaagttatatatgctcagtgcagtggctcactgctgtaatcccagcacttcgggagaccaacccaagaggattgcttgaggtcaagagtttgagaccagcccaggcagcacaatgaggacccatctgtacaaaaaataaaaaattaggccaggcgcg

SEQ ID NO: 5483 - DNA, 301 bp, Homo sapiens
catggtcattcttgcacccagtagtatattgaaagagatggtatatggctttatttcctcacctataatgtaatgtgtctctttatgctcataattcctgtgcctgggtcatagtaggtgctcagtaaatacttggtaggtggatacattggctaattattaattaatgaatatcctttaactactttctaaaatattgtcaattggcatcatgtaagactgaatttcttttcccggataggactccagtccctggtatggagatgaggagaggaaaaaagacaggggtgatggtaagagc

SEQ ID NO: 5484 - DNA, 376 bp, Homo sapiens
ggtcatcagagaacagagttttttatttgtccagtaatatcatttagtatatatttttgggtgtagataaaatctaaataatacagatagggccgggcacggtggctgatgcctgtaatcccagcactttggtaggccgagataggctgatcactcgagatcaggagtttgagaccagcctggccaacatggtgaaatctcatctctactgaaaatgcaaaattatccctgcgtggtggtgcatgcctataatcccagttacttgggaggctgagtcaggagaatcacttgaacctgggaggtagaggttgcaatgagcgaagatcatgctactgcactctagcctgggcaaaagagcgagacccaatctcaaaaa

SEQ ID NO: 5485 - DNA, 431 bp, Homo sapiens
gggccatagtcccctgtattaggtatactcaattagttattctagcacatagctttttaaatattggccaaaactggctgggcacggtggctcatgcttgtaatcccagcactttgggagctgaggcgggcagatcacgaggtcaggagttcgagaccagtctggctaacacagtgaaaccctgtctctactaaaaatagaaaaattacctgggtgtggtggcaggcacctgtaatcccagctacatgggaggctgaggcaggatacttgcttgaacccgggaggcggaggttgcagtgagccaaaattgcaccactgcactccagcctgggccacagagtgagactctgtctccaaaaaaaaaaaaaaaaaaaaaaaaaaaagggggccctttttttcggaaacccaaacgttaaaaaaacctttggggg

SEQ ID NO: 5486 - DNA, 525 bp, Homo sapiens
gttcaaaccgggacatagggggaacatggttttaacatcaaaaaaataaattgtttttaagagagggagagaaggcttccagcaggagctcttgaaggcttctaaccccgcttgctccccctgatgtcagagaataaatgcctgacaggagccagcagttagcaagcagccctgcagatattataggctatgttgtaggagtgggaccaattacccctaagatgttgggagggtccacatagcctgggcacagggatcctagggactccctcatttaccccgacccttgctgcaagttgcttgctgttattgatacctgcagcaggtgtctgggccggcagatcctgtgggggcttctgctagggccagtggggaggagagaaatgtgacagctgtctgcaaatgttggatgttggagaagctgtcattggaaagggagcaataggcatctctggggccccagaatatgtaattaggactgggagcaggcctaaaggagaccactttcttattattaaaaaaaaa

SEQ ID NO: 5487 - DNA, 407 bp, Homo sapiens
  misc_feature 341: n = A,T,C or G
gttgtttaggttgtcacttgaagcactgaaagatcaaatatgttgataaacacaatacacaatgcagaactaagcaaaggccatgtgtggacttcatagtgaatatcagaatgtaaaggataaagggaaaaatcctaaaatcttttagagacaaaacatgtattacataataaggaatgataatcagactgtcataagccttcttatcaaaaacattgaacaaaaaaagacaatagagcagaattttcaaagtactgagagaaaattactttatatttagaaacatataccaagctaaactgtcattcaacattgaagatgaaagataactattttcttanaaataatgatttagaaatctcagtactctggactttctctgaaggaattattaaagtatgtactca

SEQ ID NO: 5488 - DNA, 542 bp, Homo sapiens
ggattccaggacctgcagggtatgtgaggtatgtaaaagctattttcataaggaaacaagcaggttgcacatataagcccaacacagattaggtgctcagttgaatcacattttgcagaaagttgtggtctgcatgtatgactatacctttagtctagctttacaaagacataaaacatgtcataatcataaactaaggataaaaggaccttaaaatctagtcatcttaaggctgggcatgctggctcacgcctgtaatcccagcattttgggaggccgaggcaggcagatcacttaaggtcaggggtttgagactagcctggccaacattgtgagaccctcatatctactaaaaatacaaaaattggccaaacgcggtggctcacatctgtaatcctagcactttgggaggctaaggtgggtagatcaccagaggtcaggagtttgagaccaacctggccaacatggcaaaaccccatctctattaaaaatataaaaattagcctggtgtggtggtgcatgcctgtagtcccaaccactcg

SEQ ID NO: 5489 - DNA, 497 bp, Homo sapiens
ggatcaaaaggagacttaagtgattgagaaaaacatagtggaatccggaaagaatgacacctgaaacaaagatggtgagtataataacccatctatcctgtgtgtggttgttttttctcagaatgagggagaagctataaagcaaagatctttatctttatttacaataactcataagtaatataaacactgacttggctcttattataactgtatctagggtaccatgaactttgagtgactgagtgaagatggcagacccatactgtatctaactatagacactttttgaccaataaacaatggggcttgcagccaggcacagtggctcatgcctgtaatcccagcactttgggaggtcaaggccggtggataacttgaggtcaggagtttgagaccaccatggccaacatggtgaaacaccttctctactaaaaatacaaaaattagcctggcgtggtggcacacacctgtaatcccagctatttgggaggctg

SEQ ID NO: 5490 - DNA, 554 bp, Homo sapiens
gtaattaaacttttggttagaattaaaccacaaaaagcagggcatgaaaagtcagcatttgtttctccaggtacagtacttgcttattgtaatatccacataagataagacaataatactcctaaattgcactctaaagagctctcaattacaatctcagaaaaaaggagctccaacttcccattcatgagaggagtccattcaggaagcagacctacttacatagcagccaaggaaaaccacagcagctagtcaaataaaccaagtcttttttccttcaatctgactcaaaaaacaaacaagaaaaagctaatagaatgaagtagagagatcaatttaaacagttagattaaaacaaaaataatcaaggagaataaaaatgaattgttaaaggaagaaaatatgcattcataaaaagcatgaaaaaggatacgataataaggaagagtcaaataagataattgtcaaggaaaaacaaaagacttctaaagataaaaactgacataagccttcagaataaaatgctttgtattattagtatatgaatttgaaaa

SEQ ID NO: 5491 - DNA, 605 bp, Homo sapiens
gacagaatggcttgtgcctgtgggcgcagggactcgggaggctgaggagggaggattttttgaggccacaagtttgaagctgcaatgagctataattgcaccactgcactctagcctgagtgacaggatgagaccctttctctcaaataaaggaaaaagaaaaaaagtaataataacaaaatggaaagagtaatttaccaattactgagggagtctagaaaggttaagtataccccctctaaattgggaataacagtttaaaaaatattttattggtaaaaaataaaagccactttttatcctgagagagtatgtagaacttgaattttggtttaaagcacttattactaagcttaacgtaaatactttggcaaattgattctaacaaagatatccttctcatgacttaaaagagccactaattttacttttgaaatatgtttaatttttatattaaaagctaggatggctgggcgcagtggctcacgccagtaatcccaacactttgggaggcggaggtgggtgaatcacccgaggtcaggagttcgagaccagcctggccaacatggtgaaactccgtctgtactaaaaatacaaaaattagc

SEQ ID NO: 5492 - DNA, 548 bp, Homo sapiens
ccatcaatcattccatgtaatcctcacagccccatctgctagatgagtaaataaaggtttacagctggaaactgacttgcccaaactctaatagcctgtgtgtggcagaccctattttgccttttgggaagtgctgtgagcatcagtagttatcccaaggccaagaaaagatgagcatggtgttttgctttctcagttatcacactttattacaatactgatgtcatttttatttgccctctgtgatgagcattaattatattacgggaaaggggagaaagccaagtattgcaactttagaagtaaagaccactcccttactaagaaatctttggagacagcaaggaattttaaaaaagtaatggtacatgggcccggtgcggtggctcacgcctgtaatcccagcactttgggaggctgaggtgggcggatcactagtccaggagttcgagaccagcctggccaatatggtgaaaccccgtctctacaaaaaacacacaaaaaattagccgggcgtggtggcgtgtgcctgtagtcccagctactcg

SEQ ID NO: 5493 - DNA, 320 bp, Homo sapiens
ctccagttgcaaccaggaaaggacgcgtgggacactggggtcagagtgttggcctaagttcccgagttcttatgttggttctgctgctgcccgtgctcctgaacaacccatgtaacctctcagtgcctcaatgccattctccagatgatgagacctacacaatgcaaacattcagtgtgaatgtttctttttctttaagaaaatggaacttgacatactagataactaagccccataaaatcttcatcacaagattcttgagagcaggaaactcatggtgtgtatgaaatagaagttgatttatttaaatatgtatatat

SEQ ID NO: 5494 - DNA, 593 bp, Homo sapiens
aagggaagccagcgcgctgcgttccttgttctgataatgcacttaggaggcagcgtgcaagcagcagggagccctcccctttctttacagaagagggctagaaatggccactccatgcatggaaggatgccccgtgtcgttagtcagagggaggcatgtgaggtaccactccctgcaagaagggtaggtgtgtggagaaagtggcatgcttatacccaactgcaggtgcaaccactttggaaaacagcttggagtttcttataaaaatcaagcaaacaactaccactcaacccagcaattccgccctaaggtatttacacagagagatgaaaacatatgtgcacacacaggcttgtgcaggaatattaatagcagatttctttacaatagcctcaatctggaaaccgagaaaacactcatcgaggagcgggagacaccaactagggtgtattttacaacaactcatctatggaatgaagaaaacaaccacaacatgcgcacagcaacacaggctgcactcacaaacactccgctgcacgcgcacagcaacacacagtgctctcacaaacactccactgggtgaaagagacagg

SEQ ID NO: 5495 - DNA, 374 bp, Homo sapiens
cattcattctcctgtggcccactgtgaaatgcctgctacatgccagcattttcgttatttcctgcatcaaatgcttattgagcacactgtgcattgggccccattttaagtggcaatgaccaattctgaaaatgtcaggatatttaagcttcaggagctggcagcacaaaggggagaatctcacatatacagaaagacaaaggctcgtaagcaccttcggtaagcatctttgcaaggtaaagaggagtgggaaattttaaattaaggccactgtggtgtgaccacagttagtactctggagccagtacaatttagtttaaatgctagatctgctgattatcaaacttctgaaaaaaaaaaaaaaaaaaaaaaaa

SEQ ID NO: 5496 - DNA, 537 bp, Homo sapiens
acttttagaatcctggagtggcctaagaaaatagaaaggtagaaagtggcaattatagcccacattcctactaagcagctataaatgcaaaaatatgctgatatatcaattaccattataataaaaatacaaaaatataagttacacaatgtaggcaatgtatttgttaacacttatggatatctataactatagatatagattaatctatatagctctagattattatatctataccatagatatctataccatgtagatccatctatatggtatagataaaataaattggccagagttttctactttagtgtttatagtttcttttttttagaatagtgggcagaggaatttaaactaaacacattgggcaaagataatgtataggattttgtgtcaaggaaaaatgcccaatttaacagttaagtagcctagtaacatatgccacagcaacatgtcttgtcccaaacaatgcgcatagttgaaagagaatatgaaaaaaacaacaaaccagtatcaatgccacctgaaactcat

SEQ ID NO: 5497 - DNA, 381 bp, Homo sapiens
gaagatctcttcaaggatgtatacaatctgtacttaacagcaattaactctggctggcagaatgttgagtgatttttaaatgagtgtagactgggcacagtggctcacacctgtaatcccagcaatttgggatgccaaggggggtggatcacctgaggtcaggagttcaagactagcgtggccaacatgaaaaaacccagcctctactaaaatacaaaatacaaaaattagccaatcatggtagcaggcacctgtaatcccagctctttgggaggctgaggcatgagaatctcttgaacccggaaggtggaggttgcagtgatccaagattgtgccactgcactccagcctgggcgacagagggagattctgtcccaaaaa

SEQ ID NO: 5498 - DNA, 338 bp, Homo sapiens
ttttggtaaaataaagggccatatcttgggtagagcagtaataattacattaattaaagttttatttcaaaatgtgcataagtagattaactgaattattatactttctttcaatggggatgctatttaattagattaaaaccctttaatgtgaaatacatgtttgaatttttatatgtgattttatttgattggacaatttatttccataataacttgggttagtgtgttgggtcttaaccttaaaaagtttacatgttgcttaactaatatttgagtctatttcacacatcttttggcagtgctgttttaaaatctctcacaaagacaattagtaa

SEQ ID NO: 5499 - DNA, 569 bp, Homo sapiens
  misc_feature 475: n = A,T,C or G
ttgacaataaataatatattctaaatttttaaaattatttatctatatgtttttctttaaataatccaaagtttctataaagtagtatgagtatttaaatatataacacattaattagctttatgttatttaaaggataaaaccatttcaagaaggactattcttagatagtccatctataactactacaaaatacttcataagaccttattttaaaagggtgtgaatgtgaatatcctgataagcttatctatttttatgcttttcagaacagacttatggtttgtcaaaattctaatgctaatgcatgacagggagaattattagtcctcaaaagctcaagacccctcgaataaaatataaaaaggttgagaaaataataaggaaggatttttgtctaatgtcttttaacacactcctccccaaccattacaagggctattcaaaatatttactcaaagcctatttgtagctnttcactgtatattcccacccataaatacatcaaatatattaatcttgaactaaaataatagcattattaataatgtaactttaaatcatttaaa

SEQ ID NO: 5500 - DNA, 541 bp, Homo sapiens
agggtgaatgagtcactaaggccagccaggcttcaaggggggccacagacattaagacagtcgtgtcaaaggatttgggacatgatttaaaacctacacacagtaagattactcttcctttcttgtgcagtctctcactcccatctgtggagttaataactttgttttttcagttatctaaattgcctcaggtattctattagttttctattgctgtataacaaccaaccacaaacttagtggcttaaaaaaacaaagcccatttatctcaggttttataggccacacagtattgctagattcttctgctccaggtcttacaatataaataaatagatatgggttgggcagggtggctcatgtctgtaatccctgcactttgggaggctgaggtgggtgggtcacttgaggtcaggagtttgaagccagcctggccaacatggtgaaaccctgtctctactaaatacaaaaatttgctgggcgtggtggctcatgcctgtaatcccagcactttgggaggcccaggcaggtggatcgcttg

SEQ ID NO: 5501 - DNA, 465 bp, Homo sapiens
gtggttagaagggggggaggggggaaatgggccttcctggggagacagaggatgatgcaatcactgaatgaatttgagaatgcaggtcagaatcttggggatatcatgctttagagagaagagcaagggagactagaagggtgagaaaggttaatgcagagaagtagaacaggctgaagaaaaatggccatggaagcaaaaagtgttcatcttcagggagaatgtgcctgatcactccagggaaatagaagggagaagatgccctaggcagagagaagacagcgagatttggcaactcagggatataccactaatcttgagggggcatgtgtgcatccagtgggccataaatgctagatttgaccctagtggaggttcactcttcattagagacgagaggaaggagtgcaagatgatgtggaatttgaggacggagatcatttaagactaacttgagggatgttt

SEQ ID NO: 5502 - DNA, 596 bp, Homo sapiens
tacggctgcaagaagacgacggaaggggagccctggacgaggccctgcaaactacttgtgaagcagaaaagacagcccaaactttccggccagcggccccttcaaatccaagggtggcctgtttcacccacattctactcggctccccgaggactgcaggttgtcctataactgctggtctgagaaacactttggtcatgctaggtggcaagaaaaccatttgccaccaaaacaaagcactcccccaccagacacaagtcaggagagaaagctacctatgaagaaaaatcatctgagtatttatttaaaaactacatgctgggcacggtggctcacggctgtaatctcagcactttgggaagccaaggtgggcggatcatgaggtcaggagatcgagaccatcctggctaacatggtgaaaccccatctctactaaaaatacaaaaaaattaaccgggggtggtggcgggcgcttgtagtcgcagatactccagaggctggggcaggagaatggcatgaacccgagaggcggagcttgcagtgagccaagatcacaccactgcattccagcctgggcaacagagcgagactctgtc

SEQ ID NO: 5503 - DNA, 593 bp, Homo sapiens
cttttggcttgttaactttatgaaaagttgtgtactggactatatatttccctgggaaattagcaaaatagtgaagtagtcaggcccaactatccagcatgaaggagaaatgtcatttcacataattttcccatgtagcaaacatataattattgaaatgttgaaacttattaacagtattttgagaaaaaccataaaaatgttttatatttagaactaattttaaactttattttacaatggcaacattaatagtcatcagtaattgtgcattccatatccttctgtgttttatcacaaattttattttcctgattatggatgtttacttttaccccataatgtttgggggatttggagctaacattaatagccacattattctgatactgttactttttcacagtattcattttgtacctctaatattttaatatttcagtggaaggccactattataaagaactccttttaaaaaattgtgtatgtctttattttcagaatatttttggccaaaaaagtatcttttgacacatttgtagtcactgggtagaatagaacatcatatcataacgtttatattttcaaatatt

SEQ ID NO: 5504 - DNA, 589 bp, Homo sapiens
tctatagatcaaaatgcgttaatttgaagtagtaataataatgatgcagaggatgacgaggatgatagatgattactatatgtgagacactattctaagtgttttacatttatttacttatgagaccctcactataatcctatgaggtaagcactattattatataatatggacgtacaaagagcttaaataattttcttaaggaatatagctagtaaacgtcataatcaggattgtgaatcagtctggctccagaaccagtgatcttaaccactgtgctatacagtatagggttactacttgtaagccagttttatgctagagaaaagctatctcacctctaaacgattattggttttagaaaatgtgcctctcttttaaatagtgattcagtcttatagctaatggtctattaaggttactcatatttaatgacaataaaactgcacctcacatgtatgataatgtttttgttggccgggcgtggtggctcacgcctgtaatcccagcactttgggaggccgaggtgggcggatcacgaggtcaggagatcgagaccatcctggctaacatggtgaaatcccatctc

SEQ ID NO: 5505 - DNA, 497 bp, Homo sapiens
ggccaagactattgttttaaagtgtgaaaattgatattgaattcttgtgtttatataataaggtctcctataatttctgtttggaatataaaatcagcaactaatatgtattttcaaagcattataaatacagagtgctaagtgaggggactgtgaaatgtagtcatataaagaatataataattatactggattatttttaaatgggcagtctaacattatattaaaaggtttcatcagtaattaattatatcaaaatgctccaggccgggcgtggtggcttatgcctgtaatcccagcactttgggaggtcgaagtgggcggatcacttgaggtcaggagttggagactagcctggccaacacgatgaaaccccgtctctactaaaaatacaaaaaattagccgggcgcggtggcgggcgcctgtagtcccagctactcgggaggctgaggcaggagaatggcgtgaacccgggaagcggagcttgcagtgagcc

SEQ ID NO: 5506 - DNA, 502 bp, Homo sapiens
gatctgcctgcctcggcctcccaagtgctgggattacaggcgtgagccactgtgcctggctaagacctagagaaaaataggtttaaaattttgattattgcttgtacacattataagcgtttgggccttgaagtatttccctcttcaaattatattagactaaaacacacatacatacacacacacacacacatacttctgtgacttagtagttgcagttaaaagttaaatgcctacatatactgaactgtgtgataaatggctacgctccatctttcagtgctgggcaacagcatacctctgttcttcctgcttcacccaagagcactgaataaactcttcccttctaggctgctggcagaaacatcccagattctcttttctgtggtgttagcattgccaatatttatcacaagaatccccacatccatactaggccttcagagaaaagggatgggatacccactctgctgagtccagagagagatggctaacttttact

SEQ ID NO: 5507 - DNA, 582 bp, Homo sapiens
tacatcttagtttccgtctttggttcagtattcatgatgatttagggcattaaaggagagacagatatgctaacatccactcttgtgccatgtgtcttaacaggactccacataggcccatctgtaattctactccctctagttagaggctttagattggcaagtgggttgcaaaattccttttatgttttccctgatccccatgttagcctgtttgcctctctagaaccaagagcattcttgtgtgtaaatttgaaatttctgtcactttatcactcatatagtctcctttggcattcccatgtacatctgagatttgaaatttctatcactttaggccaggcgcggtggctcacgcctgtaatcccagcactttgggaggccaaggtgggtggatcacgaggtcaggagatcgagaccatcttggctaacacggtggaaccctgtctccactaaaaatacacaaaattcgctgggtgtggtggcgggcacctgtagtcccagctacttgggaggctgaggcaggagagtggcgtgaacccgggaggcggagcttgcagtgagctgagatcacgccactgc

SEQ ID NO: 5508 - DNA, 584 bp, Homo sapiens
aaccattatagaaatggttatgtctccagtcacgatggtgacaaggaatctgggaatgcagacagacatgaatgatatttccagaaatgagaagttctgaaggaagaaatgcatgggagtctgcagatggggatctgaaagggtgagagagtgataaagatcagattcccagtcccacttagcatgtaggtagcaagaaatatgaaaagcacaacctgccactgtgggtcacttgtcaatccaagaagaataaattctattactgccttgcaatttcttattacttattactttctttctttattatgttactctttattttagctataaaataaatgaagaaataagaaagctataacaccagtaaagaaacttaaacacacacgcacacaaacacacattttaagaacatcattgttatcttttcttttacaataaaatgattttgtggtacatagacccacaatattttttaacaattttgttatttattatgtcacatattaattcattacttgtatatttctttcattacattctcatatattacaatacaaatatctctcttctgaatgttcaacata

SEQ ID NO: 5509 - DNA, 559 bp, Homo sapiens
tcattacattattttccttgtgattaatttgctaaacggaggtgaacaaagtagtcctaaactaaaatttatttaccatttctcctttaaatacaaagacaaatatgatctattcatgacattataccactgtttctgttatttcccatattaacttggcgtagttgtttaaaacattcttttcttctttgtagatgaagaaaatatgacagtgaaataacgattactattgatcagtcatagttgtttaaaataatgtctaatgggctgggtgcggtggttcacacctgtaatctcagcactttgggaagccgaggcgggaggatcacgaggtcaggagtttgagaccagcctggctagcatggtgaaaccccatctctactaaaaatacaaaacattagccgggcatggtggtgcatgcctgtactcccagctactcgggaggctgaggcaggagaattgcttgaacccgggaggcagaggtgtaatttatgagaggagttcaagataaaaagaactggaaggctgggcacggtgggtcacgcctgtaatcccagca

SEQ ID NO: 5510 - DNA, 583 bp, Homo sapiens
tactacatagatggaacagggagtggttgtgtcacatgcaaaatatgatggagccaatttggatcttattatttatgttttacttaattataagcttaattctgggccatgttactctactctccatcagacttaaagtatttttttaaaaagtcaagaaagcaatggagactctagtggaaaatggaaaagaggaatagcttgcatttttgtataaaattttattaataatggccataatatagaatttttttttaattagaaagaaaaatgtctaatgttcccagtagattataatatgtaatattccctggaaaccaagcaacaccatatatctgtaaattatccatccgaataggaaacaaaggcatcccagatcatttaaattcagcagtaatccccaaagctcaatttaggcatggttcttaatattctactccaaaacttcaatatagtttatttactatttatcttctaacagagtgaatagcataaaataagcaacttgaagaagggaactctaaaggaattaaaaatgtaaaatgtaggccaggcacagtggctcatgcctgtaatcccagca

SEQ ID NO: 5511 - DNA, 587 bp, Homo sapiens
cgcctcttcctatgttgtaagtccttcctgtggtcttgaactccagggctcaagcaatacctcccgccttggcctcccaaagtcttgggattaaatgcgtgagccactgcacctagtgagaattatggagtaaggactttcctgtgactcacagcctctgactggaggacttacctgcagtttcttaccagctgtgggctcttccccattcttcctcccgcacgttgtaggatgtgtcaaactagacctcttagcttgttatcttagtaagcagtcttatttttgtgtcagacaaaaggcttagaatttgcctgtgccaggtcgggcgtgatagctcaagcctgtaatcccagcactttgggagtccaaggcgggtagatcacttaaggtcaggcattcgagacaagcctggccaacatggcaaaaccttgactctactaaaaatacaaaaattagttgggtgtcatggtacatgccagctactcaggaggctggggcaggagaattgctggagcccggaaggcagaggttgcagtaagctgagagtgcgccattgcactccagcctggaggctggagtgacagagc

SEQ ID NO: 5512 - DNA, 204 bp, Homo sapiens
taaaaacaaaactcctcaatataaggtgtactaaaatttctaaacatatttttaaatgcctggatgtgtcatgctacttaaagctgagtttatatgtccactcatgtttgatcacatcaaatgtaccggggggttccttatttttaatgagtaaagggtggtttttaaaaaagtgtatgttagatatttaacagagtagaaatg

SEQ ID NO: 5513 - DNA, 590 bp, Homo sapiens
aagtggggccttggcggtgaggagaggtaaaagtaaggctgggaaggcaagcagccgcctttgtcaaagtgctgatttttatttccttctacgtacaatgggaagtcactggcaggcttaggaaaggggagtgaaagattagagctgcatttttaaaagatgatcatgtgaggactgggcctaaggagcaagagcagaaacttagggcaggagttttgaggcaggagatgctggcctggtctgggatagagaacagtgacattatccaagatatatttgaaagatagaatcagcaaaaatattggcaaatgagagagaaggaggtaccaaaaatatctcctaattttctggagctcctaggtaaatagtgtaccatttactaagataagaaatacttaggaagatgctacaggatgaagcatcaagaattcagtcttggaaaccaaacggcatcagcatagctgttagaaggacagtcagatttactaacttctgtgttagcatctgtgccactgtttccatcatctgtgaagtgggaactatggtagaacctatacggttgctggcatgcagtaatctcagtaaaatat

SEQ ID NO: 5514 - DNA, 326 bp, Homo sapiens
tcattaatccaaatagactacagagatatgtaagtcacatcaaccattgttaatgaatccagcttttgttgtgttgttgtttaaaaatgacagatggatctgttataaccattcatctcctcttattctgtggtagatagtcccataaatgagttagtgatattgtgaataaatcatagttgctcaataggtaaaaactctaagttagtgcttttctatttatgttgcatttttattcatatactgtatacatttcttttgaagcgctaatcttcattaaatcaaaatgttatatttttttaattttatagtacttgtagtaaacc

SEQ ID NO: 5515 - DNA, 369 bp, Homo sapiens
ctttgtcttaataaataacattatattcacatgaatattgagttaaattgattcattttgtgtgtccttttaaagattgactttggaagtctccctttttaggagattttagaattgtgttggagaaattgggaatttcattaacaacatatagtcaatgcaggtaactgtttcaggcgcttcctcaaagcaaggatgacccaggagaggtacaatcatcttagtgtgctttatgtgattcatatgaaattcaacccttttggagtttcagttcttagcaaaataccacttcctgtttttgaggaaaaaaatggcataagaagtcatataaaaagactcataaggcccttggacatcaaataactctta

SEQ ID NO: 5516 - DNA, 591 bp, Homo sapiens
agatcacaagctcaggagttcaagaccagcctggccaataatggtaaatccccgtctctactaaaaatgcaaaaatcagcggggcatgttggtggacacctgtactcccagctactcgggaggctgaggcaggagaattgcttaaagctgggaggtggaggttgcaatgagccgagatcatgccactgccctccagcctgggcgacagagcaacactccatctcaaaacaacaacaacaacaacaaaaaacataaaataactcaaacttaattaaatataaccctaatggggaatgattatttgtcaacaataacaaagatatattactcagaacagagataagagtccaacaagaatccaagagtcttactttttaatcacaaaacaaatcctttcctttccaagtaatatcctctcaaggccaggaattctgtaagtagatagccttcttaaaaaacattcctggcgggacaaggtggttcatgcctgtaatcccagcattttgggaggctgaagcgggaggatcacctgaggtcaggagttcaagacccacctggccaacatggtgaaaccccaactctactaaaaat

SEQ ID NO: 5517 - DNA, 582 bp, Homo sapiens
tagactcaaagtgagggtcggggcaagcgcttagccactgtctcatttcacctttctcttagcttaatggaatggtgggcaggtgctccacttcccaatacccacactacaagagcttctagccctttatctcatcaccactgaagtagacctcctgagaaactctctaaaggtgctcctcaaactcagcaaatgtggaagagactctagaattccaaacccagcaaagcaggtttttgatcaactcatggaggaaaattcagatatatctcaggaaaacagggacttaaaaatacatatgaaggccaggtgcagtggctcacacctgtaatcccagcactttgggaggccgaggtgggtggatcacctcaggtcaggagtttgagaccagcctgaccaacatggagaaaccccatatctactaaaaatacaaaactaggcgtggtggcgcatgcctgtaatcccagctactcgggaggctgaagcagaagaatcgcttgaacctgggaggcagaggttgcagtgagcctagatcgcgccattgcactccagcctgggcaacaagagcaaaaaactccgtct

SEQ ID NO: 5518 - DNA, 579 bp, Homo sapiens
catttccactctttggggcctgtaatcactcatgatagccctttaatgtgtcccttagactctatgatatttgatagtaaaagaggtattgaaagcatattttctggtcctcctgctttcagattcttccttctgtccctacttctgagatggagactgagtagggagtcaccaaactgatctggagaagatgaactagatatgctcagattatggaccctggcctcagtggggagaaactggaattctaacccaccagtccaactgtcatatccaattttaaactctggctgcgaaccatggctcacacctgtaatcccagcattttggaaggccaggcagaaggatttcttgagttcaggagttcaagaccagcctaggcaacatagtgagacactgtctctacaaaaataaaaataaaaaacatgtctggcagcagacttctcagtggaaagcttacaggccaggcgagagtggcatgacatatttaaagtgctgaagaaaaaaaaaaaacttttatcctagaataatatatccagggaaaatatccttcaaagatgaaggagaaataaagattcc

SEQ ID NO: 5519 - DNA, 557 bp, Homo sapiens
tgaatgtcagtgtagctgacatgagtgttttttattatatgactgtgttctttctataaaaatcaggcattgagagaagcccagatgtgaagcttggaacaataaaaccaaaggaagaatacatcagaggtttgtaaaacttagataatatggaagtaattaaccattagactcacgatatgttctctaacagtaaccttgaaactccatgttttgtgtctaatgacttctaggacacataaagacaaaaggaaagaataatatgctttcagagcatgaagaacttgctttagagtccctgtgtcttttgactcgaatacacaggtttattatatcatgcagttatgaatctgaggaaagtatgacatgatcgataggtctaattctaaaatatctgataaagaagttaataccaaaattagtgagtttcctaactttaaagtgaaataactagataaagaagaactaaatgcaaagctagcagaaggaaggaaataataaagattagaacagtgttaactgaaatagagaataggaaagcaataggagagattagt

SEQ ID NO: 5520 - DNA, 456 bp, Homo sapiens
ggtcggccacgttcagcggacacgggagcaagatggcgattccgggcaggcagtatgggcttattttgccaaagaaaacacagcagttgcaccctgttttgcaaaaaccatcagtgtttgggaatgattctgatgataatgatgagacctctgtgagtgaaagccttcagagggaagctgctaagaagtaggccatgaaacagaccaaactggaaatccagaaggcccttgcagaagatgctactgtgtatgaatatgacagtatttatgatgaaatgcagaaaaaaaaggaggaaaataatcccaaattgcttttggggaaagacagaaagcccaagtatattcacaacttgctaaaagcagttgagatcagaaaaaaggaactggaaaaaagaatggaaaagaaaatacagagagaacgagaaatggaaaagggggagtttgatgataaagaag

SEQ ID NO: 5521 - DNA, 527 bp, Homo sapiens
accccatctctacagaggaaccgtgacattagccgagctgtggtggtgcctgcctgtagtcccaactactcaggaggctgaggtgggaggatcgcttgagcccaggaggtggaagctacagtgaactgtgatcatggccctccaaggcctgagagacagagtgaggctgaggtgggaggatcgcttgagcccaggaggtggaggctacagtgaactgtgatcatatcacggccctccagcctgggcaacagagtgaggccctgtctcaaaaaaaaagaaagcccgttgggacgcgggcaaggagactgagcagaagatgggcatgagcctgactatggggagtcctgctggccatgcagggaatttggattttattggagaaacagaggaagcctttggaaggtttcacatcaagggaactgtgctcaccttgcttcctcctaaggagaccacagggttcagcacagctgcacccgcagtaggggcttggtgctgctggccaacttggagcagctgaagttgcctgc

SEQ ID NO: 5522 - DNA, 568 bp, Homo sapiens
gagaggccaaggcaggcagggggcttgagcccaggaattcaagaccagcctgggcaacatggtgaaaccccatctctacagaaaaatacaaaaattagctggatgtggtgatgtgcacctgtagtcctagctacttggaaggctgaggtgggaggattgcttgagccctggaggttgagtctgtggtgagcagtgatcatgtacaagctgcaccccagcctgggagacacagctagactctgtctcaaataataataataatacagaaaaaaactatggacctagatattttattttatgtatcgtagtatctttcttacatatcagtttttataataatatttatccatgataccatctgtaagacaggaattgtgtaaaaataacaatgctggctatgcacagtgactcatacctgtggtcccagcactttgggaggctaagacaggaggctcacttgagaccaggagttcaagaccaccctgagtaacatagtgagaccctgtctctgcaaaaaaattaaaaaattacccaggcatggtggtgcgtacctgtggtcccagccact

SEQ ID NO: 5523 - DNA, 536 bp, Homo sapiens
actgagttttggaagcatctcccacaaggagtatttttgttttagttttagaagcaggtaacaacagaaaaataaaacaaaatacagcaaaaacccctttcactttggctactgtagatcagaacatccgggtgcctcctggataaattaggaataagactttttagactttcattacatgcagtgttatttgaggaacaccgtttatcctaatgagcatgattataacctgggtctactataccaacagcaggctgctaattcttgccttttgtatgcttatttcccttctgatttgaacttaagaattctaaaattatgccaggcacagtggctcatgcctgtaatcccaacactttgggaagtcaaggtggagtatcgcttgaggccaggaatttgagaccagcctgggcaacgtaatgagaaccccacctctacaaaaaaattaaaatattagctgggcgtagtgatgcctgcctagagtcttagctacttgggaggctgaggtgggaggatcacttgagcccaggagatcg

SEQ ID NO: 5524 - DNA, 525 bp, Homo sapiens
gaataggaaagaaaggaaagaacccctggaagagatctaagtggcgcctgaaggtcaaagagagaaaaaggaaccctgttaacctgattctgggacttaatagtttcccctctttggggtgattcttcccccaaggtgggttttccgcatgagcagtgctttccttacccttaggattgagcacacgcagtgtcctcagaaagctatacatgcccatctgaggcttttttccgttttccgatgccacgtgtccccagaacgtcatacttcaccatttgtctcttaacacacatgcccaagaagctgctgctccctggggcttgcatagcattgaacacttttaatattaacaggtgtggaccatcaggagattgtatcttggcggggcacggtggcccacacctgtaaccccagcactctgggaggccaaggtgggcggattacctgaggttgggagttcaagaccagcctgaccaacttggagaaaccccgtgtctactcaaagcacaaaattagccaggcaag

SEQ ID NO: 5525 - DNA, 420 bp, Homo sapiens
gaaaccccgtctctacttaaaacacaaaaaactagccaggcgtggtggcgggtgcctgtagtcccagctactctggaggctgaggcaggagaatggcgtgaacccaggaggcagagcttgcagtgagccgagattgtaccggggggctccagcctggacgacagagagagactctgtctcaaaaaaacaaacaaacaaaaaaaaattgtcaacttgtcctgaaggagcaaaaagagtaactgaataactctgatatttttcttcaatcctgattcaatcacttattctttcagaaaacagaaaattttaagaaatggcatttactggacttaaagacttactcatcatcttcccataatcccacctccagaaaatcaccattaatacttccatctacaaaaaaaaaaaaaaaaaaaaaaa

SEQ ID NO: 5526 - DNA, 582 bp, Homo sapiens
gttagccaggtgggcgtgtgcagaggggtggaacccacagacaccccagcccaggagccattcctgatgtgggagatagtgtgtggtatctccagtgagccccctgaggctcactcatccaaagggcctcagtctcgaacgacaggcacggtcaagacaaggcaatggcacctgtcctaaaattccttacacacctctaggaaatatatccacagataatagcttcgccttgtagtgcatgaggtccttgaatgattcctcaccctcttttggtccagttatctttctccttctatgtagcatttcaaacactccactcacagtagtagccttcatcaggaaactcagaaatctaaaccaatgactttggggtcaggctgctcatcagaatcgcttgggagatagtgtaacaatacgattcctcggccctgttcccggaaattatgatgctttcggtacaaagtgggcccagaaatgtgtgttttagaatgctccctggggctgggcgcagtggctcatgcacgttatcccaacactttgggaggccaatgagggcagatcgtttgagcccaggagtttaag

SEQ ID NO: 5527 - DNA, 435 bp, Homo sapiens
  misc_feature 368: n = A,T,C or G
gatactttctatttaaattcggatttacatagtttttacttaatcttattgataatatatctgcatctcctttctcccacaccaaaaatctcaaacaatacccaacatagttattcatttgttttatcctgtaacaggggggtattttcaaaatgactttaccaacactaccatcaacagtatataaccactgaaaatagtttaaaattatttttagatacttttaaagtccttgggttgtgtcgacgtacagacaaaacagtgttttaaaattatttggaaaatgattacttaaaataatgaaaacttcttttgccattctttcttgttgtcaggctatatggatatacatccaaatgactggattntaaaatcacttggaagagtttggtaggttcatattgtcaacccataatgcaagtcagttagtttcat

SEQ ID NO: 5528 - DNA, 383 bp, Homo sapiens
atacatatcagaaggtatatattgaatagatcaagtgagtatcctcctgagctacacaagttaatgtgatttggagccataaataacaaactgtttcatctccattgccacctcatgcatctccattcttgaggggtatcgtaatatggtggtttgatttgaagttgcctggacacgagatacatccatgaaatcctacaagtaccagattcttcatttggaaacttgtgctcattccactgcaatatgctgcttctgagagaatgagcatgcccttctccccagtccccaccatacattttatcagggaaccctgagtatacggaaccgaggactgctaaatttttctgggaaaaggggagagactggagattaggaacatg

SEQ ID NO: 5529 - DNA, 556 bp, Homo sapiens
aacactgatcttaactgctttccccaaccttcccccaattcgctgttatctgatactcagtaaactgccagagatgcattaccaaaataatatggaggtggtcaaaatcatcatgaagaatgtagacatggaatctgtttgcctgcggtcaaatcccggccccacctcttactcgctgtgagaccttggatgagtcatttaaacgctctatgcttttgtttcctcatctgtaaaataggcttaataattgtacgtatttcctgagattgataaaaattaaatgggttaatatttgtcaagtgctaacaagagaggttggcatgcagtcactgttatgtaagagttaactatcattataagtaacgcacaggccctgactttgagtttccaatgagtcactttcttcagataccacaaaaacttttgggagatattgttctctgcctcatctgacagtcttctgggaattaggaagccatcaagatgaactctgagcaagagtgaaagcagttcatgactggatagctctaattcacctgcttctaatttcatccat

SEQ ID NO: 5530 - DNA, 459 bp, Homo sapiens
aaagaatatttggcaatcgttaaagtatccaaaaaaatgttttttgggaacaggaaattttcatccgattgaacatttaggtaaaataaacttctctctccattccagaggtacattcttatttttatgaattggctagtgactggagctggttaaaaaaatggtgcaaactctgtgagttcactagcactttgttaaatgaaattgatcacttgtaaaatacagtaattgcattaaacaactgtcattaaccataagatccccttgatgatgtctcttacacagctccacagggaaagcactaaaagtacacacatgcacacacatgcgcacatatacactagccaaaatgtttcctgagtataaaataagacaggagaaaacacagtagagtagtagagactctcagcaggaaccacatttgaaaaaataatgataaatgatatcatgataaaaatg

SEQ ID NO: 5531 - DNA, 336 bp, Homo sapiens
actgaaagaagccagaggagtggcagtagggtactgtgacaagaagcagagaaagagacattgatttatcgttagaacacaccactgcagaggtttaggaagagcaattttggcagaggacaagggctaacatccagtgagcctagcactagggtgattcatgaatatcaggctgtgaagaccatcagatcttcacccaccagatagaatgaccgagagatcccagggggctgtaattcttatgtccaatttctagccttgcattattgaaaaaaaggaggctgggcatggtggctcacacctgtaatcccaacactttgggaggctgagtggggg

SEQ ID NO: 5532 - DNA, 316 bp, Homo sapiens
gtgtggaggaggcgactgccaccgtggtgtgtgagggcggatgagcagcggggccgtgggtgtgcgcggcgtggcgcgccagtcctgatgccagcatgggttgttcatcaccgctgctgtccctgctgtcgctcctggttggtgcgtggctcaggctaggtcattgaaccgccggccacgccgggggcgctgggaaaggggatggggccctccgccctggcgggagagagcctgaggcccctctgcccgcttccgggatgcgcctgcagccgccggctggggaggtcgctctcggtgcgcagggtgcctcaccgac

SEQ ID NO: 5533 - DNA, 283 bp, Homo sapiens
tgaagtagggctcacaaaaatgagaaatagaattgccaactaaagatacacttgtgtccagatgactctgtaaagtgttatcagaccaaaactgacgcggttagcctttaccatcatgttgatcagggggtgtcagttgaaaaaccttatttttgagactgctacagtgtgaagcatctcaagagcaggtactgagccctcggtaatagcctttgttctgtaaggttttgaagttgtatatattggagatactagacatttaagataaatgtgcatttataga

SEQ ID NO: 5534 - DNA, 499 bp, Homo sapiens
tgtccagtttcctaatgaaactctttaaagtggattcagatgtcacttccatttgttgaagaatgcaggttctcactgtgtagtccaggctggagtgcagtggtgcagtcataacttatcacagtctcaaaatcctaggctcaagttacctttgcccttcccaagtagctaggactacaaaagcagcatctacagctttcagaaaggcacagcaagaacaaaagatctctttctagaacatggttaaagaaaatataaaatacttacctgactagagatgaaggccctcaaaccagcaggtgaagagatattctccaacaccacttccacgccaatcttcaccttctccagggtagggagaataccctttggtggaaacccagaacactcacagccacagacacagaaaaagaagatggcttatttcacatataacccctagagggaatctatggtctacctatctggaaaaatcgaaaggaagtttggagttgatgat

SEQ ID NO: 5535 - DNA, 603 bp, Homo sapiens
gatgaagaaagagcttcctgcaattcaaggactgtacaaagctgaaacgcagagattttcatattatttgggagactcagaaatgagcttttaaggttgttccttgacttgcgggtcaataagcgcacaatggtgaagaaaaggctgccttctagtgacacggtgttccggtttgagactccgggcagcccaaggaaggccaacgtggaggcctcacgcagctccacagacagccccagctcggtgttcctcagctcagaggctgagaatggtgtggaggagaaaaagaaagcctgcaggtcgccaacagcccaatcccctaccccatctgtggaggcggactccccagaccagaaggaaatcattagcctatggtcaaaatccagttttgatggtgcctctttggcaagtgataagaacgactgtaaaacagaaagcaaaaatgaccctaagactgaaagaaaaaagtcttcatcttccagccagtacaaggccaatatgcactttcacaagttgtttcttagtgtcccaacggaggaaccactgaagcaaagctttacctgtgctctacagaaagaaatactataccaaggaaagctcttt

SEQ ID NO: 5536 - DNA, 573 bp, Homo sapiens
gggctctccccgcgtccaagatggcggcagaagcagctggtgggaaatacagaagcacagtcagcaaaagcaaagacccctcggggctgctcatctctgtgatcaggactctgtctactagtgacgatgtcgaagacagggaaaatgaaaagggtcgccttgaagaagcctacgagaaatgtgaccgtgacctggatgaattgattgtacagcactacacagaattgacgacagccattcgcacataccagagcatcacagagcgcatcactaactcccgaaataaaataaagcaggtaaaagagaacctgctttcatgcaagatgctgctgcactgcaaacgggatgagcttcggaaactgtggattgaaggaattgagcataagcatgtcctgaacttgttggatgaaattgagaatatcaagcaagtgcctcaaaagctggaacagtgcatggccagcaagcactatctcagtgccactgacatgttggtgtcagcagttgagtctttggagggccccctgctccaggtggaaggactgagtgaccttcgactagagcttcacagcaaga

SEQ ID NO: 5537 - DNA, 556 bp, Homo sapiens
ggtataagtaggtaataactggtagatgtagtattctcatctgccctcaatacttttccttgccaaagaaacatctgtaattcaaggttagtaaagaggaggtagataggtttaatgaaaagagcttgagctttagaatcaagaagacttgtgtagacattctgggccccatttattcctcctctataaaaaggtataaaacaatggttactttttaggaattctgccacaattgaattagatgatttatctaaagcaccacacatagtatttggcataaattagcgcgttaataaataacacaagaacttagcacttaaaacatgatacaatttcaagtattattagcaataaactaagaaaagtatctttgggctgggcgtggtggctcacactataatcccagcactttgggaggccgacatgggtattacctgaggtcagagattcaagatcagcctggccaacatggtgaaaccccgtctctactaaaaatataaaaaaattagccgggcgtggtggtgggtgcctataatcccagctacttgggaggctg

SEQ ID NO: 5538 - DNA, 611 bp, Homo sapiens
cagccaaactaaaccttggaatatttctaggattatgaaaacattatgatgtatgattacttactaagaaacaggttaaaaggttaagtattaagagaaattatcttttatttaaaaataataaaagaaaaatttaagcaaattatctaaaccatgaaaatgaagacaatgatagtagacaacaaaatattttacctaatgtttaatatgttttaaaactatacatcaacattgtgactttattaagcattgacattcaagtaagagctatttattttaaataaggtaatttatcttgtttccactagactctagttattatgccatcataacacatacctttgctcctctatattctaacccagaaattgtaatcatcattatcttttaagtcagcagcagcagcactagcagttattgatcacatacaatatacaggagactaactgatttccctactttatttactttttaaatgtttaatcattggctatatattgtaagccagttcagagctagaagtatgcaatactcacctttgtgtcaacactttaaacatataactcaatgatttgataaataagataatctgaatacattgattttaaaag

SEQ ID NO: 5539 - DNA, 601 bp, Homo sapiens
cacctctaccattcccacctcccaggctaggaagcggtgctcagcgaggggagatggctgcccgccgtggcacgggcgtccttgcctcatcagcactctgttctgcctcctgcaagtcccttgccagagcttggcagctggttcacttccgagtgaaggttggctggcttattgttactattgtcttcaaaatacaatgtgtatttacacagagacacagtagcacctagcaggttctgtcctgggccctggaaggtaaaggtaaagaaaaggaagatggctgggcttggtggctcacacttgtagtttcagtactttgggaggaggccgaggtgggagactcacttgagcccaggagttccagaccaaactgggcaatgtggtgagactccatgtctacaaaataaaaaaaaattagccaggtttgggccgggtgcggtggctcacgcctgtaatccctcggcactttgggaggccgaggcaggcggatcatgaggtcaggagatcgagaccatcctggctaacacggtgaaaccctgtctctactaaaaatacaaaaaaatagctgggcatggtggcgggcgcctgtagtcccagctac

SEQ ID NO: 5540 - DNA, 611 bp, Homo sapiens
ttattagctgggcgcggtggctcatgcctgtaatcccagcactttgggaggctgaggtgggtggatcacgagatcaagagatcaagaccatcctggccttcgtggtgaaaccccatctctactaaaaatacaaaaattagctgggcatggtggcatgcacctgtagtcccagctacttgggaggatgaggcaggggaatcgcttgaacccgggaggcgaatgttgcagtgagccgagatcgcaccactgcactccagcctggcgacagagcgagactctgtctcaaaaaaaaaacaaataaaaaataaaagtaaaattacatcgagagctgacttacggcttcaaaaattgtttgtactcagtgtacccttcaaaggatgaaattctaacaatcttagtcctatttgaaacattttagtcctatgcaattaacatttctaagtaagtacagataagccataaattctataaccatgttagaagacagactgaatcttgaacatttataactaacttatccaattttatggtaaatttttgaagttctgtaatctgtacagattaatataactctgaagattaatctatagattactataactgaaagtcag

SEQ ID NO: 5541 - DNA, 697 bp, Homo sapiens
atctgcaagggacaccaggaaatgtagtttcattttgggcaggcacgcaccaatcagaggtcctataaccaagaaaagaggggagaatagatatcgtgagacaggtgaagtctcagcattggatggccttcctctagcgagcttgaagtgggctcagccctggtcagaagggagggcagtggccccggtgcatgaagggaaacaagcctttgttgaaaatgtcctagattctaatctctgtactggatgctttcttatgttctgtcccccaggcatcacagtccccgtgtgatgtgggtattgttatgttcaagttacaggcaggaaaattgagattctgaggaagtcatgtgccggaggtcatacagctgggaggcatgacgtgctgtgactctagagctttggaatggagcctgtgctctttccactaccttacacctcccttgcatctgggatccaaagctaggaaataaaaataggcctctttaggccgggtgcagtggctcacgcctgtaatcccagcactttgggaggccaaggcgggcggatcatgaggtcatgagatcgagaccatcctggctaacacggtgaaaccccgtctctactaaaaatacaaaaaaacttaaccgggcgtggtggcgggcgcctatagtcccagctactcgggaggctgaggcaggagaatagcatgaacccg

SEQ ID NO: 5542 - DNA, 591 bp, Homo sapiens
aacagaactgatccctgttctccaaacgtgccctgtgcttttctgccttcgtactcaatattctgtccacctgcaacttttcctgtccaccccatcttcaactacatacacctcaaaatccagctcctgcctaccctaaattactctgcctaccatccccccagagtgcatttctatatgcaccttcactattatccggttaacacttggcttcaagctagctgaaaagattgacgttttttgaagctaaaaagaaacttcaggtggaatttcccattctcccagctaaacataataaccctcttaatgcttgtacttagggtgatcctagaactgtctcttcttccaaaatgtttcagttcattgccaaagcactgttgaggttaaagattgttaaaatgtctcacctagcttaaaatcaaattttaggacttcatcaaaatttgaaatgttttattcagggatcaaaatattggtccccaaacactgggcttctcccaaaatatttctcactcccctacatggcttacacaaagaaacaaacacacgaacacacacaaactcagaggcccaaagcaagtcacctgcatt

SEQ ID NO: 5543 - DNA, 404 bp, Homo sapiens
atccagaacctttaaaaacaggagtgaactttcaggggactccaggtgactcttggctctattctgtaaaggaacccttatggcatttttgaatcactactgtaatatttctcatgggttttcaagcaaaaccctcatttggaaaagatggtaattgaattcaagaaaggagaagtaacttgttctaggtcacacaaaataataataagcctgactcaaaccctggacttttgacactcaggccactgctctttttattattctaggatatcttgctatctgttggaacttgatgtgatgaaagtcatatcctagctcagcactattcaatatgatatccacaggtcacatgtggtccctgggcagtggaaatgttgttaatgtgattgaattaaaatggaaaa

SEQ ID NO: 5544 - DNA, 556 bp, Homo sapiens
atgatcaacctgtaaagcccctagatcgagcagtcttctggatcgagtttgtcatgcgccacaaaggagccaagcacctgcgatcagctgcccatgacctcacctggttccagcactactctatagatgtgattgggttcctgctgacctgtgtggcaactgctatattcttgttcacaaaatgttttttattttcctgtcaaaaatttaataaaactagaaagatagaaaagagggaatagatctttccaaattcaagaaagacctgatggggtaatcctgttaattccagccacatagaatttggtgaaaaccttgctattttcatattatctattctgttattttatcttagctatatagcctagaattccatgatcatgaggttgtgagtatatctcattctttcgttgtattttcctaggtgtctttactctcttctctcactttgtgacacaaggacatgaatacatctaaattttcctatttctgatatgactgttttgatgatgtcattacttctataaccttaagtgatagggtgacatgcaatatg

SEQ ID NO: 5545 - DNA, 215 bp, Homo sapiens
acacttggtgggtgtgggaaaggattcaaatgtaggtctgttctcttcttcatctatcatggtccctgtcctggaggcaagtcgtctggggctcagaaaacacccctgttgccactgattggaattccaagggtctgggtgaagtggggatgggcctccagcttgcctccagcctgaaaaaatagtagagggtgttgaggctgggaagggaggtg

SEQ ID NO: 5546 - DNA, 510 bp, Homo sapiens
gattcgggtggggacacagccaaatcatatcaccttcctaactattcttgctgtggtcacctttcagaccttgacaacattttcactgaactttcctattagttttcagtgagacttcctgtctcctctttttctctcctccaatccgttctatacactgtttctagttaaaatccatacaaccccccgcccccacccaaagaaattcccagcttgacatttgtgataatttcacatatattttaaaatttagacttgtcttaccctgagggtaagtttggttctcacaatccaaatccattttccaaaaacatttattacatttttatccctgctctagcaaattaccatggatttagtaactcaaaactatacaaattgtgggctggacgcagtggctcaggcctgtaatcccagctctttgggaggctgaggcgggtggatcacctgaggtcagaagttcaagaccagcctggccaacatggtgaaaccccatctctactaaaaata

SEQ ID NO: 5547 - DNA, 234 bp, Homo sapiens
gctgagactgcagtgagccatgttcataccactggacttcagcctgggtgacaaagtgagaccctgtcacaaacaaacaaacaaacaaacaaacaaaaaagaaaagtagtattcacgttttggacattcctatctaaactaggtggaaagagaaaatggagagtactgggttctaaggaggcaggtattctagggtaagtaatttggtattttaatttaagcagaaagacatgg

SEQ ID NO: 5548 - DNA, 491 bp, Homo sapiens
tcggacccagagaggttgtggaccctcggggcctgacccacgggacccattcgtgaggctggccttggcactccctgaacgggatggaagtggggttcagcccgtctgaggactcaagagagggcgggactttgtggcagcgcaccggcggggcctcagccgcgtcccaaccgagctagacgggactgccctctagtggggagtgcttggctagtcgcgagtccagcggcgacgcgcgactgtcggcattccctttgccggtaccaggtgcagactgagggtcggtgctgaggctgctctatcaacacaggctaggctcaagggtagtgtagctgcagacagactggacataccagcaacaggaaaataccagggaatgagggccgtgggctagcttggggaaagtcagtctcacaggaggtgacatcaagatgcaatcaagaagaggggcattctggccgggcgcggtggctcacgcctgtaatcccagc

SEQ ID NO: 5549 - DNA, 469 bp, Homo sapiens
catggtggaagattacaggtcatctttgaaggacttgagggattgaaaaccataggtcttcagtctctatatcattttctttagtaactttgaacccagataatattaacattatgataaaaataatttcagattgatgtatgtaagaatcgtgtgtaatgaccaggtatgaggcaccctcataaaattccttgtaatcctctgaaacaggaagattatagtgattaagccatagatcttttagattatacattggtacatttacttcataacttctttataggaacacagtcaaatgtcttagtattcagaaatacttcacctttggtttcatttataaagcattgactcctttgtataagaaatttagcctgttcatcacaaaacaatttaattactactctgggctgctcaagatggtttgtacattagtatttagatgaattttagatggttgcaggtctgtagt

SEQ ID NO: 5550 - DNA, 536 bp, Homo sapiens
gctgccttctctacctcaccccccgcccccagcacggtggcactgtggctctggcgcctggtgacttctccctccccggcctcaggtttgcttcactcttccaagggccttcttggtgtgactgtcctgtcctggccacgtccactccaagcagctggtccaggtgtggggcagcccccaagctcagcagaggacagttttgagacttagaggaggacggcatcagatttacatgaagtcagccatctcaagggattaccacgtcaccgcctcctctcacaggtctgagagctggtcccctggagggtgcaggtctcatcctaggtagaacagtcccagcctagcttcaaagcgctcctgctgccagaaagggtagaaaaccatgctgaatgccttcactgttgcctggaatgggagcctcagtttcaccatctgtaaagtgagattaatgaaagggacccacagagggctgttagagccagtaggcggccaggcgcggtggctcacgcctgtaatcccagcactttgggaggctg

SEQ ID NO: 5551 - DNA, 553 bp, Homo sapiens
caagttgtcaggctgaggtaggtggctgtgctggaggctcaggccaggaggccctgaccagtgaggagtagaaggggccatgaccaacattaaaaactatatgactgcttttccagaaggcagcttgccctgtgctggaggcccacaatagtcataacgatcttcactccctcctgaccctgaaggcagttgggtagtggctggagctgcaatagcagcaaaaacagcagatatgtctattgcctctgggagcttcatcccagagaaatgcagagctgctgccagtcaaagaggtcaagtgggtgtttcatggctgttctggagttccaggtcagtgtgctttgcccagagaggtttaccagaggcaaggcatgagtccctctgctcctcagaaccatgaatgtagccactaacctttggcatgcagagaacttggccttccttgttggtgaagctatggcaactagcactggggtgcttaggggtctaagacctccgggacttctcatgtgcctgatctggagctctgcccagattctatgcagctctcctt

SEQ ID NO: 5552 - DNA, 523 bp, Homo sapiens
atcacgaggtcaggaggtcaggagttcgagaccagcctggccaacatagtgaaaccatgtttctactaaaaatacaaaaattagctgggcatggtggcacacacctgtagtcccagctactcaggtggctgaggcaggagaatcgcttgaacccaggaggtggaggctgtgatgagccgagattgcgccagtgcactccagcctgggcaacagagcaagactccatctcaaaaaaatatatgtttttacaaaaaaaatcaatatgatattttgaaaatgagatcactgaggtccattctggaaactggtcagggtgtactaaagaaataaaccgcatacttcataaggccagggcataaagaagggtggcatcatttacacctttggcaaaatgagacttaaggtgccccagtgtcgtgtgggagatcctaagtctgtgttgaaaacaatgactgaggctgggcactgtggctcacgactgtaatcccagcactttgggaggccgaggcaggcggatcacctg

SEQ ID NO: 5553 - DNA, 281 bp, Homo sapiens
gatacagcaacgacgtttgtcactgcagttactaggtaagcaaaggaatgacatttgaaccttcccggaaaggaaacagcttgtttgttttaaatccgtaggaaaagtactttgtttcacttgactgctttgtggaaatgcaagaggtatcatgttgctgtcaaaacagtcagtagttttgtttcctgcatcaacatagagtgaaaagactaaatgaggccctattacttttattaatatggttactataataaagagaatgggtagtttcaaatttgtta

SEQ ID NO: 5554 - DNA, 300 bp, Homo sapiens
gtggagagtggaggtgggtgtggattctacttctacttcccgtcggagacagcagagttgatgaaaggtgtgctaacagggtgctcatcgagaattagattgagactcaagtcacagccaacttaaatggctggaatgcatacaggtttatttttttcatacaaccagatgttcaaggtagatatttgttacctatcactggttcctttaatctgcaatgctcactgctgtacgccaaatgtttgtgttaccctaaattcatatgttaaaaccttagctccaatgtgatgggatgagggg

SEQ ID NO: 5555 - DNA, 525 bp, Homo sapiens
ataaaaaggggaaatttgtccacagatatgcacacaggtagaacaccatgtgaacatgaaggcagagatccaggtgatgcacctacaagccaaagtatgccaaagatgaccagcaaaccaccagaagccaggggagaggcatggaacataaggtttctcacagttgtcgaagaaaccaactctaacaacgtgatctagaacttctagtctccagatctatgagataataaatttctgttgtctaagccaccaagtttgtggtacttcgttgcagcaagcctagcaaactaatgcacacatattctatattttgaagaaaaaattcccagagaatcatttttaaaatggttaaattaagcaaaataaaacaaaccaaaaaaagaaaagtcccaactacctgaaatatttaattgtcttaggaaactgacttaaaaatatctaatacaggccgggcgcggtggctcacgcctgtaatcccaacactttgggaggccgaggtgggtggatcacaaggtcaggagttca

SEQ ID NO: 5556 - DNA, 558 bp, Homo sapiens
tatataaaaattatattttatatttcataagagtgttaccactgggttggaaacacagtccaaagcactgggttcctttggaaatctcttggaaacgtgtgtttcatttcctgcaggacgtggtgctgatgagggccttgcgagacatgaacttgcccaaatttgtgtttgaagatgttcctcttttccttggtttgatttcggatctgtttcctgggctggactgccctcgcgtccgctaccctgacttcaacgatgcggtagagcaggtcctggaggagaacggctacgcggtcctacccatccaggtaaagccaggaaaatgacctcactgtggccgtgcatcctttccattggctttttgtttttgcagttctttaaaaaatatatgtacagtaaaatacgcataagtttcaccatcttaaccatttttccccatttttaaatcacagtaaaatacacataacaatatttaccatcttacctacttttaaatgtagagtttgttaggccgggcacagtggcttacgcctgtaatcccagcacttcgggaggctg

SEQ ID NO: 5557 - DNA, 550 bp, Homo sapiens
tgattttgcaaaaattactcaatttctacagtggatgtgtttggaacacatcacaaccctgattgccattttagagagaagcagacacaacagcagcatgcatgggatcactgaagactacatcttcagtcagttatcttggcttcattctgattgtttatgaggattaaactttggagcaatcctagatgagttattctcaaactttagagtgcacgagagtcactcagatggcttattaaaacagactgctgggtccaaatcccagacttgctgattcaataggtcaaggtggtgcccaataatttgcatttgtcataagttcccacgtgatgctgatgctgctggtctcagaatcacattttagaaccactacctaagctaagctaatggctatcctcagctttggctacatctgcacttaattaaaagatggtgacctcttccccacatgccacatctatccagatgttaacttcattatacaggattcatgcctagtgcccttttgattaagctgcctcagtggactcaactaagcatttcccat

SEQ ID NO: 5558 - DNA, 540 bp, Homo sapiens
aaaggaaaataaccagcccaaatgtctgtgtgtgtgtgtgtgtgtggtgtgtctgcctcccttccacctcattcacagtgggcaacctgtattataagtttcttacctatctttccataaatattctctatatagaagagcaaacaggttgtctgtttacacaaatgttacatacaatagaaattcttttacaccttgctacctgatttaacatatcttggaattcactctttgtcatacacaaagatcaatcttattcctaggattggctacataatactccttcaaatggctatgccataatttagttaaccagctctgtactgctggacttggctttgtttccaatcttttgctattacagtgttacagtaaataccgtgtagctcacaggctaatcagagaaaggcaaagtcacctggcagctaagtgcaagagatggtaagagcagacagctggcagttagggtaagctttcctggggtagggtcctgaaggatgagtaggagttcaccagataaagaagtgaatgatgggtctg

SEQ ID NO: 5559 - DNA, 510 bp, Homo sapiens
ttttagttataagccacccaatttatgtgttttgttataagatcccccaatggactcagacaatttggctggccagttctggctctgggtctcccatgaggctgccatcgtacatcagccagggctgcagtcatctcaaggcctgactgggggcatcttggaggctggataccacaagtacctaccatgagccaggtggtgtacaagtaatatatagcaacaacaatcataatgtacaattggaagttatttcatgtttactatgtgtccagatgttaagtactttccctgagttacctcctttatcttcataaaaaccctacaaatttggtctggttatcatctcattgaagaggttagaaaactggggcttagaggccaggcctggtggctcatgcctgtaatcccagcactttggtaggccgaggtggacggatcatgaggtcagaagatcgagaccatcctcgccaacatggtgaaaccccgtctctactaaaattaaaaaaaaaa

SEQ ID NO: 5560 - DNA, 460 bp, Homo sapiens
tgagtggtgactgagtccccaacagtggaatggcctccatgcctaggcttacatgtgagagacagggttcctcccccattgctgagcagcactgtggtgctgctacctgtctggggctgtgggtggcaaccccgcactgcagccacagccaacaccagtatgcaccagccaggaccgaaagagtcatcccaccactgctactggcatcacccataccatgccagctgcccggggactcatgaacccactcacacacctggcccaccactgccactactaacatttaaacaaaccatctgaaggtccagtaactgacctgcctggtactgctaacaccagtgccactgcacacagccccaggacccaagatcaggcacactcagcccaccactactaccactgaggcctgaagactagcccaactggcacccctgtcctcagcaaaacttcaccatagccc

SEQ ID NO: 5561 - DNA, 238 bp, Homo sapiens
aaacaactgactatcagcaatttcataaggttcttaacctaatagaagaaaatgcagagaaaaggtttggcttccttcaaaggttgtaagtacataaaacctggtgccaagtttccccttgtgggaggaacagtgtttagcaaaatacctcgatatttgccttggtttgaaaggtgaggctccatgaaccagagtgaaacagtcatgtgagaaaagtaacaggaagtgggaaaggagg

SEQ ID NO: 5562 - DNA, 539 bp, Homo sapiens
tatgcatatccttattcactcagtaaatacttagtaaataaagaattgaaagctgatccacaatttatgaattaagtatattttgtctatatacaaatgaggacattaacatgaattacaacataagtgcacacatattttgaagtatgctcatattgtgtttcacatattttgtaataacacaaagcagtaaaaaagagttcaaataatttatttcttgggtactttctttaggttagttaaaacctaacttcacagtctgtaactgagtcagatacacagaaaatagcagacctggggaaaaaaatgttattattttattcagtataagaacttcaaagtttgaacgcattattttccaaactaaataaaagtattcaaaaaattaatataggctgtataagcttatatgacttagtcttaatcataaggaccttaactttttactctgtaggtacattatataaaaaactaagagtaaatttcatgagttttataattttattacatattctgtcttagaaaggaactagttcctt

SEQ ID NO: 5563 - DNA, 482 bp, Homo sapiens
gcagcatacacactccactgatcacctttgggagatgctagtgaattctcattatttttaaaagatatacaataggaaggtgagcattcattcttattttcttgtatcttcacttcataggaactcaatagttgaagaagatgtatttctttttaaggtaagtattctagctaataaatagaaaatgaatgacagaatatgaacatcatacaatgcctacattaatgaatctatgcaatgatcatcaatggctgcaaatatcacagaaagagaatcaaccaaacattatactacatgtatacttactttgatacatggccgccttttgtttatgtccagtttccaaaccttctagattgaggagtttaagtgctccaggaggagtttgagtgctccagtgttcatctaacaagttgtgtaaatcttttgttgtgcctaacaacactgacttattcctttaaggtggcaatggaagagttaat

SEQ ID NO: 5564 - DNA, 566 bp, Homo sapiens
gttgaatgaatgaatgagtgtctgctgccttaggtagaagagattcttggaccatttcttggcttgagaatctcagagaacagggctagagcaaaagctgaaagtcagttctcaggtttagggaccaactctgttgatatccattcatgggatttcactcatgaaaggaatgtggatgtgctacttggatgtgctagactgactccctacgacatagatttcaacctttattttgcttcccaatgacatcttctggttgattatagatgttaatgccaagattttcacatcccgtccaaacaatatgctaagtcttataacagaatgtaccctggtgcccatgggaactcagaagagagaatttcaagtcattttttaaaagggcatcacatgattgttaggagaaataactaatacaagtggttttgacaagaaattcttaaatatttcataggaataacagtgtcatcattctttggatcatcatgatatgagtcatcaattatgctattgggttcaattcaatttaatctaataagaatgaaatgagcacccacttcaagcct

SEQ ID NO: 5565 - DNA, 519 bp, Homo sapiens
tgctaaatttcacccctttcaactccattacttaatttcccctttgagatttgtttcctctcttcatgactctttggagttgtgagagaccaccaactcagatattgacccactgaaaagtcactaacacaccaatggctccggaaagtgctatttcttcagacttcttaagcagatagattaattagaggccattttgtcaaaatacagactaggtagagaacagagggacctagatgggtggagtctcctatcaccagccactatgttacatcttctattgtgccagagcttaacaactcacttgagaatgctaaatatcaacctccatttgagaaacacttcagtagaatcttcacttggcaaaactaaaagggttttggctttcatttctttaaggacatgtgtcactgatttttgtgagtgattctaaacagccagttgaactcttaggaagcattcaaggattaagcatctagtgaaggccgggcgcggtggctcacgcctgtaatcccagca

SEQ ID NO: 5566 - DNA, 406 bp, Homo sapiens
cacctgggaggcctggggagtgcccccctctgtctatcactctgggtacacatacatatgatcaagaagcatgacgaaagactcaggctatcagccactggcatcaaaatatgctgtccagtggcccaaagactgccctgttcaccacagcctgcacccacaggtacaacagaggagcctggggacaggccttccctgcctggtggcacctcccacagtgattgagtgcactgtctggaggcttggggatccatccaccctgcttgctgcttctggcatgcactgcaccatcagggggtctaacaacagacccaaaccactgactgcctgcactcaaacacattgtttgagggtctggggattgcctcacttggtccaacacagcctgtgcccacgtgcaccattg

SEQ ID NO: 5567 - DNA, 419 bp, Homo sapiens
ctaaatataatacaaaatataataagtaatatcaaaatgcaatgcatggctactacacctctggatttcattttggttgtacttgcatggaaagagaagtactagctggttagatgtgaaagaattgtggtaagtttcagggacagaccagaacagaaatgagaaagatttgtttattttagagaaaaggaagatgcattctcagaaaagtcaaaattaacaaatacaaagtggaaaaacaatatgtacgctatggatttgttaaccatacttcatggtttatttgagatagtacttgcttactcatattgttcttcccaaaattgttaataacacactcttttacttaaaatgtggttaaatttggaaaagtaattatatggtcatcttctctatggaggcatcaaggagacagatca

SEQ ID NO: 5568 - DNA, 555 bp, Homo sapiens
acgagcgtggcaggagcctccaatctgcttccaagagttgagaagtggtacagtacccaacacacacatacatctcatgaagaggcaattgtagttatgtaagaagctaaaaatattttttctttcaattactgtacatgtattatttttcaaacagctacaagttgttaggatgcaaatactaatgaagtcacttggatctaactacttaataaacaaaaccattaggtatttcttttggtctaggggtaccacacaaataattactgagtcactaagggtgacgtgagcagagaaagtttgggaatatctggcctaatcgaataatgtatatagaaacatacgctccaaaactgaaaatacctagcactttgggaggccaagagcaggggattgcttcagcccaggagtttgagaacagcctgggcaacatagcaagaccttgcctctaccaagaattaaaaaaaataaaaataaaaaaaccaaacacacacacgaaaactggccaggcatgatggtgcacctatagacccagctacttgggaaggagggggc

SEQ ID NO: 5569 - DNA, 566 bp, Homo sapiens
ctgcccgtccaggctcaggtttggtcatgtgacttgctttggccaatgaaataaaagcagatgtcaggtatacctgacctgagtaaaagctttaagggtcgacacgtgtgttttcacatctttctattgttctttttttctccatcagaagaatgcaatatcccagatgggggctgctacttctgactctggatgctgagatgaggaagtcttatggagcagtcatgtgtcttaaagccagagcagagtgagaaacaagcttctgtggcgagaacctcctctgataaaagctgactgacatgccaactacctaagggatacacccgcctccaaactaagaactaggagagggactatgacccatgcccccaaagcatccacagtctagacctctcattagttcttgcataagggtttataaaccaagggagtgttagaggccacagtgagtttgaataaacttcacagcccgatgcagtagttcatgcccataattccagcactttgagaaactgaggcgggaggattgcttgaacccaggccacatgatgaaataacatctctac

SEQ ID NO: 5570 - DNA, 555 bp, Homo sapiens
tgcagctgctcactcctgtaatcctagcactttaggaagctgaggtgggcagatcacttgaggtcaggagtttgaaaccagcctggccaacatggtgaaaccctgtctctactaaaaatacaaaaaaaattagccgggcatagtggctcatgcctgtaatcccagctattggggaggatgaggcaggagaattgcttgaacccgggaggtggagttgtagtgagccgagatcacaccactgcacttcagcctgggcaacagagtgagacttgtctcaaaagaaaaagaccaaatatctagctattcataattttaaaggtatctgtgaatgcaaacaaaacaaaacaaaacaaaagaaaccagtatatatctcttgctttacaatgattggaaagggaatgaaactgaggatttactaaaaaatagttttcatttatataatattttaatttgtgcatgcacaataaatgttgcatatatcagaaaagaaaattaaatgtgtatactgtacaaataacttaaaatcactgtataagaattacttttggccgggta

SEQ ID NO: 5571 - DNA, 433 bp, Homo sapiens
ggtggtggtgatttttaacacaaatggtggtgccattctatatggtctgctttgcagtttacttttttccactcagtagtgtatcttgaatagtcttcccatatcagtacttaatagtctcattcttttaatgcttgtatatagtattttattacattatatgaattttgttttgttttgtttttgagacagagtctcgctctgtcgcccaggctggagtgcagtggcacaatctcggctcactgcaagctctgcctcccaggttcacgccattctcctgcctcagcctcccgaatagctgggactacaggcgcccgtcaccacgcccggctaattttttgtatttttaggagagacggggtttcactgtgttagccaggatggtctcaatctcccccaaagtgctgggattacaggcgtgagccactgcacc

SEQ ID NO: 5572 - DNA, 533 bp, Homo sapiens
aactccaacctatatttttaaataaaatcaatatgattccccttgtatattttactactttctttctaatttgtgtcaatgctgcactgatcaataaattacaaattcttacacagaaatttctgaaatgtagccttttattattacttatatttttaattgccaagtattctaagtcatgttttggtacctgggctagaatacaaccctttctttatattttctttaattaatgtccttattctagaaaatgatgataattagtgcctacccagttcttgccaactactttctaatttcagaaatttttctaattttttgagatttaataaatacagccataatggagaattgagagggatgccatggaatattctgctgcatctaaacaatgtcatgtttgtttggtaattgtttttctttgtaccgattattttagttgctgtggctgttcccataaatatttgtacacagctggacataattttgcagtgcttatttccctgttaaaacccctactccacccaaagaac

SEQ ID NO: 5573 - DNA, 335 bp, Homo sapiens
ttcttttctgcagcttttttctcttcacttgagacccatgtatgtgatgatagtgtaatgataaattatccatgtggcgtccctccagtcttgttcattattcaagtgactctccttggtttagcaacaggttaagaggtatctatgacattttgttcaggttaagcagaaagaagaaaacaaaatctacattctctttttcatattttaaacacagccaacaaataatttggaaggacccatgattagacagagaggattttatgccccttcaagagtaattgagattctttaattgtatgggggaatgagcatatctcaaggggaagggagaa

SEQ ID NO: 5574 - DNA, 564 bp, Homo sapiens
agggctgactggagatgccagagatcacacaaatttgggacatagcagagtggagagaactcacaaagtatacctagaacatgtggctgagggccatgaggatgaatctttcctagagtaagagtcactgtctaagtctacaggcaaaaatctaataaataagcacaaactaacaaaagcccaggtttgacaggagaaaaagggtggtcaaataatttaactaggcatcaagacatttaacagaaataaaggttaaaatgttatgaaaatgaaagactgaatttataaggaagacttaacaatcctaaatgtgtacacatgacagcttcaaaatactttaagcaaaaactgctcaagtagacagatctagaattacagctggagattttaacataactctcaatacattgtatgatgagtaaaaaatcagtaaggacacagaagatgtgcatagtcacaagctccaccagttgatctaattgacatctgaagaacactgaaccaccgggcgccacggctcacacacttaatcccagctctttgggaggccgaggtgggcggatt

SEQ ID NO: 5575 - DNA, 575 bp, Homo sapiens
gggaggaccagggaagtctttcccaaggaagtgatgtttgaggtaagaactaaaggacaaaagatgttaactctgtgaagagagaatctgaaggtaaggggtgaaaaacaccccaggcacaggggaatgtgcacaggccctgacagaggtgggagagagcacagccaaggggaagttttcctgagaaacctaacgttcaagcaccagggagaccaaataaacactgtcaaatgcaacagacaagaggaaaaattgaactaggataaaaagtcaaaatttcaagtgaagctaacacctacatagcatttgtgtgccaggtacagttcgaagtgccatatatatatgttaataactcaccacagatctataagtggatactattattacacctgtgttacaaatgatgaaataagaggccgggcttggtggctcacacctgttatcccagcactttgggaggacaaggcgggtggatcacctgaggtcaggagtttgagaccagcctaaccaatatggtgaaaccctgtctctactaaaaatgcaaaaaaaattaggcgggcgtggtggcatgtgcc

SEQ ID NO: 5576 - DNA, 568 bp, Homo sapiens
cagtaagttctgtctatctatacccacagttctatctatacccacagcattatgtggaggctacaaaaagctttaaggcaaaacttcatgcaaacttgaaacaaatactctaacacaaataacaggggatcaaaaacaaaacaaggctggacacagtggctcatgcctataatccccagcagtgtgggaggccaatgtgggtactttgagcctaggagtttgagaccagcctggcaacacagtgagactcccgtatctacaaaaaataaaaaaattagccaggtatggtagtgcatgcctgtagccccagctactcaggaggctgaggcaggaggatcacttgagcccaggagtccaaggctgcagtgagctatgtcagcgccactgctctccagtacgggcaacacagtgagaccctgtctctaaaacaaaacaaaacaacaaaaaacatactcatgaactgttaaaaatcaatagtcattaacagaaaaagctctgtaaaggccatcagatgacttacaaagttatctggttccccctggttatgatgtcagctatacgaccacag

SEQ ID NO: 5577 - DNA, 576 bp, Homo sapiens
ccctattctgtcattaaaagtgaaataaatgtgcagagttgcaaaaaaattatcgattcgttcataaagatttgtattatttgtatttaataacaactttgtaagaatttaatatttattcttataagtatataaacaaggccgggtgcggtggctcaagcctgtaatcccagcactttgggaggctgagatgagcggatcacttgaagtcgggagttcgagaccaaactgaccaacatggagaaaccctgtcttcactaaaaatacaaaattagccagctgtggtggcgcatgcctgtaatcccagctactcaggaggctgaggcaggagaattgcttgaacccaggaggcagaggttgcggtgagctgagattgtgccattgcactccaggctgggaaacaagagcgaaactgtctaaataaataaataaataaataaatgtaaacaagaaaacaggctgggcatggtggcttgtgcctataatcccagcacttcgggaagtcaatgcacgcagatcgcttgagctcaggagttcaagacgagcctaggccacatggcaaaacctcatctctac

SEQ ID NO: 5578 - DNA, 568 bp, Homo sapiens
tactcttttatttatgactttcataggtactgcagcacttttttatgaagtagtcttctgtgggattcatactgcttataattgtgatcctttcacctagttggaagcacctgtcaccctggaggtgttcctagattagccctctcttggtataagcagggctctaactcttaggccagctttctttcaccctaggattaatttcatcaagttcattcactgagccagtttatatttactgattccccactgtgggctgaatactgtgggagtacatgtaagagctcttctgtattatatcatctagtgggtgagaaactctgtaaaactataatgtaaggagaataaatgctcagtagagctttgggaaggtttcacaaggagtggcatttgagctgaattttgcagaagtaaaattcattttgaaaaactagataataggtattccaagctgaaggaagaacctgaaaggaagttttgcatgctatagaagttcatagaaggtttctagtcagacttacataggttcaaggaagaaagtagattgtaaactgagggttaagaataa

SEQ ID NO: 5579 - DNA, 437 bp, Homo sapiens
ttaataatgcacaacaaatttacataaacaaaatttttaagaggatccagaaaactctcatagaatcttttcaagactttatttaacacattatataaagttggaaaaacctactttttccaagctatcagcatttagattgttttaaatgtcttctatttttaaaaattaaggttagcaacccaaaacttttaaaataaacactttgtaaataatgaaaatgagaacctatcatatcaaaattaccacaaggtaaatttattactgtaatttatttaataaaagaatgaaaactaaactccaaattaaagaagttagaacatagaaataagaaaaagtaaattaataatcaattcaaattattcaaaaaatagtaacagactaatttcttatggatataataaaaggtatagaagtgtacaaaataagtaatgcaa

SEQ ID NO: 5580 - DNA, 531 bp, Homo sapiens
gatggttggcccctgccctaggggcccctgtgggcacactcagagcctctctgcccaaaaccagaggcggtccctgggtgttgtgcgtggcaggaggcgggaggcactggctctgctccccaggagtggccttaaggcagtcagggaatgcacctcacactcgggcacagaggtgtctccagagcagagctcggaccagagaatggaaggcataaagcatccctggagggctgggtggccctgggagagtgcaggtcatcctgccatgggaatcagaccctggcttgtccccaccatcaggccctggggtgcctgtcatcccccctcccagatgtcatgctcctcagggtgagaactggctgtggacctggggctgccactccccagctcagagaggggtcattgtcctggcgggcagagggcctggatcctcgcctgtgagttagagactcgtgcgcccctgagtgaaggcagtagagagctggttcagtttggccagaggagaattccatccaccccctgagtgggagg

SEQ ID NO: 5581 - DNA, 533 bp, Homo sapiens
ctgtgcagctgtgggacccaggctgggacatgagccatgggagcactggaccctctcccattctcccagtcccagcatggactggttgtgtgacctggataggacccctccactctctgggcctcagtttccccatacagaaggcttggatcttttggtatctggggagccccccagctcttcttacagcactttgaagcctcacgtcatggccccactcccaggccaggcccatccagggctctgcagatgaatgtatggtcctcagcctggtagtcccagctttgagaggagccccttacccttgcctggcctgctctcccattcagctccagggattccaagggatactggcagcaccctggtctggctagtcttaggtttcctccctcagatggggtcctgccgcctaggaagaggtgggagcagccacctcaggcctggcctggtgctggcaccctcagtgtgaagaggccggagtcactccgaacagcacagctgctccacacccacctctgtgctgatcttacagt

SEQ ID NO: 5582 - DNA, 488 bp, Homo sapiens
catcatataacaaaagttgttaaaagtgctatataccatataatgttgcatctaaactgggacacttatctgagatgcttttgcgtgggacaaatgctatattagaaatgactaggactggccaggtgcagtggctcacacgggtaatcccagcactttgggagactgaggcacgtggatcatttgaggtcaggaattcaagaccagcttggccaacatggtgagaccccgtctctactaaaagtacaaaaattagctgggtgtgatggcatgtgcctgtaatcccagctacttgggaggctgaggcaggagaatctgaacctgggaggtggaggttgcagtgagccgagattgtgccactgcgctccagcctgggcaacagagtgaaactctgtttcgaaagaaagaaaagaaatgactaggacagcaggagtaaaaccccaaggcattaggtctctgattttgttaagcttttcttttgctttgct

SEQ ID NO: 5583 - DNA, 399 bp, Homo sapiens
tatcccattgttacttctttttaaaggattttaaatttgttttagcctaaacttttacatatcccttgtaaaagtaaataaaaatatgagaactaatttgtcagcatagaatttccagacatgcaatacaaatttctttaacttgggacatttgcaagtttaaaataaaatgggtctttcaaaaaatggtgttgtatgggagtggtggttcacacctgtaatcctagcactttgggaggccgaggcaggtggatcacctgaggtcaggagttggagaccagcatgggcaacatgtagaaaccctgtctctactaaaatacaaaaattagccaggcatggtggtgcatgcctgtaatccctgctacttgggaggctgaggcagcagaatcgcttgaacct

SEQ ID NO: 5584 - DNA, 536 bp, Homo sapiens
ttcattacatcttttctatattttcataacatattctacaaaggacatgttaatgtatttgaataacagcataacatattctattaaaggaaatgttcttttttgtttttcattacattctattcaaagaaatattaatttctaaaatgttacattttaacgttctcagatacattctatttgctggacaatatctcaaagaaaaaatgctaaaagtttaaagctacaatagatattattcccttttaactactattttaatgaattaattttttagttccattttctcatacttattggctatgtaatttactgaacaaaagcaatagtcataagaaatccaagtaatagattactgagcatgttacctaggcatatttccactgtcacacagaatgaagtctcagtgctacaatccagttaatcagaataggaacaagtagtacaccttttttataaaaacaattttcttgaaaaaaattttctctgagtattctaatacatctttttttgttagtcaagagcaaaattatttc

SEQ ID NO: 5585 - DNA, 458 bp, Homo sapiens
  misc_feature 156, 157: n = A,T,C or G
tgtgctattaaagacatcatattattggggtgtcgtaaaactggccactgttgttgcctacactcacccttcgggttacagagtgactgcaagagagatttggggtgactagaggccaatggacctagccatttggccaaggggcgtcaatggtannaggagctggattagcatggggtggagttcagtttttcttagaaatgtgcgactctgcaaaagtgtgcctttatttttggcacaaattgctatagcaaattacatagcttatcagatgtggttttttgggctcagtggagaaaccagtgcagggacttgtctttgttcttcattcccagttgggaatttgggataaatcagtgtcctgttataattcaggaacaaacttgaataataagaaactcacattactctaacttaacaaagtagaccttagtcttaaagagatttccattctccct

SEQ ID NO: 5586 - DNA, 540 bp, Homo sapiens
ggggatcctgctgaggataccaagacaaatgagatgttcctaccctggcacaactcaccatcctgagcaggagtgtcagggccacttagcaggtaatttaatttagggttagggttccagtgaagccagatataaggagccaatgaaccctgaagccattgcattctttgtgccagagtacattcccatccaccttggggaatggctaggaggctggttctggggtgtacttggtgtcattactgggcagagatggtgaacagcccttggacaattctccaggctttctctcccctgccttggaggctgtggaggcctcatgttgagtggaaggaaccacaggttagaagcactggaatccttgagtcacagcatggaggacagctgccctcatgagctgttactgctgacccagactcgtgctaaactttgcttgaatgacaaaccaactttgttgacataaatccctagattgggggattaattattacagcaattactctaggttatctggacaagtacgccatagataaagccctg

SEQ ID NO: 5587 - DNA, 404 bp, Homo sapiens
atgttcatgatccattgcttggtgaaaaattcacttacaatacagtgtaagtgtatatagtagaatcccaatttcataaaaacaaaataaaaaatactggacttccaggaccaagactgtcaagaaagaattaactgctgtaactgtcaaatcaaatgaagctgtacagtccgattagaaagtttgggtctgaattattgataggtgtaaaaaaactaagcaaaaaccacaaatcattattaaccctaagggaaacaaaattctacgataagagaacaattgctttagtgcacaacatagttcagttgtgaataacatttgcaagccctcagaagtgcaaacactgagcactgatatcagttaaaaggttttatgatacaactattctatgagaaaatgggaga

SEQ ID NO: 5588 - DNA, 534 bp, Homo sapiens
tttactttattacttcttgcttttgattgatataaagcagagtcctggtaggcatattgtgtatacttgcaaagatgcagaactaaacagttgttaatattaaaacaaaagtcctgtaaacctcagatggtgagtgtaatattttagcactaacaccaaagcctcaaatatgaaaagatatcaaaaacaccactagcaaacaaaagtaaactctcagccggaagcagtagttcatacctgtaagcccagcactttggcaagctaaggtgggaggattacttggagtcaggagtccgagaccagcctgggcagcatagtgaattcacatctctacaaaaaaatttaaaaattagcatgcctatagtcctagctacttgggagtctgaggtgggaaaatcgcttgagcccaggagtttgaggctgctgtagctacgataatgccactgcactctagcctaggtgacagagcaagacctagataattacattctgtcctgctcctgtttacactaaaatcactaagttaaaatgctt

SEQ ID NO: 5589 - DNA, 408 bp, Homo sapiens
gtgaggacatccattaaaaggttaggatcctgtgacctatttatcagtctagtgaataatatatgtatgttttcaaatgttaaacaactctcaaattctggaataaaccccactttgcaaggtgtattgtactttagtgttttgctgtattttgtttataatgcttatctaagatttgttcaaatgaatctgctccgtggtcatctcctgctaccataggcatgcagtattgatgctcatctcttaagaaataactgtcgtccaggcatggtggctcacacttataatcctagcatgttaggaggcgaggcaggaggatcccttgtgcccgggagttacagatcagcctgggcaacatagtgtgacactttcttgttttctcactcaaataacaaaaatagtgccagg

SEQ ID NO: 5590 - DNA, 538 bp, Homo sapiens
atattgattgccatcagctttttcctcatagcagcatattgtgacttcctatatccattaacatatttatttcttaatttttaatggctgagtggtgtggtactctgatgaaatttatagtttatttagccagtctcctttattggacatttattttcaggtttgcattagtaataagcacagtggtcatctttgcacaattctttcttaggatgaatttctagaagtaaaatttctggatcaaagagttcacatttttgaggctttaaatctaaatgccaaactgtagtctccagaggttgtagcaattcacattccttccagtattaaagtgtactcattcttcctatcatggatagtagacattttcccaaatcattgttaacctggtcatttaaaaaatttcatctcagtcaggcacagtggctcacgcttgtaatctcagcactctgggagaccgaagcgggcggatcacctgaggtcaggagttggagaccagcctgggcaacatggtgaaaccccgtctctactgaaaata

SEQ ID NO: 5591 - DNA, 545 bp, Homo sapiens
tggctctgctgatgccaatgagcctggaagaggaccctgagcctcagatgggagagacactcgagtcagccccttgacttcagcccggtgagacccaggaggacctagcagctcacactcagcctcctgacccagggaagctgggaactgatcagtgtgttgttgtaaacaccaaatttgcagtcatttgttatgcagcaaaagggaaaaaaaaatagacgtatccggatatgttcaacttaaaaagacgcccacctacccggatacacctggggtggtgggtactgtctgtccctggggacgcaagaagcccacactctccagtctccctgtagttataccagggctcagtgtcagtgagttaaggccagtggacttcaagaccttgcccttaaaaatatccctcaacggccgggcatgttggctcacgcctgtaatcccagcactttgggaggccgaggcaggcagatcacccgaggtcgggagttcgagaccagcctggccaacatgatgaaaccccgtctctactaaaaatacaaaaaatt

SEQ ID NO: 5592 - DNA, 456 bp, Homo sapiens
gtgttcaactcactgagtttatctagaggtctagctttctaattttttaaacaagtgtgtcacattacacatacaaacatgaccgcttcctggttattgagcctttgggatttttctaggtttcactctgtgttctttgtatcatgaacatctttgaacagaacatttttgagattatccctttgagtttattctccaaagtgggcttagctttagttttacaacaaaatcaacaatcaagaatattcagtttgtatagaacacattcattcattttttttcttttttttgagatggagtcttgctcttgtcgcataggttggagtgcagtggcgtgatctcaggtcactgcacccgccgcctcccaagttcaagcagttctcctgcctcagcctcctgagtagcggggattacagacgtgtgccaacacccctggctaatttttgtatttttagt

SEQ ID NO: 5593 - DNA, 505 bp, Homo sapiens
tgggcaaccaattcattttattttaaaacaaaaattcactacacaagatttttttaatataacacaacttttatttttaccttcttcaacaaaactcctccatatatttataactcatccacatatttatatctcttattttctgattaattacatgtcctatatataatttaaatataccttgagttagacagagatattttacctttaataagaacactttaaaaaagtgtttttctataattttatactggaaattatccagatacataatatcaaataatagcctttgatcctaaattatgacaagtttgtttatagcatttagttttttacatttgttataggagttactaagcaattattttaggctgggtatgatggttcaggtctgtaatcccagcattctgagacgctttggtgggtggatcacctgatgaaaggagtgtgagatcagcctggccaacatggtgaaaccccatctctactaaaaatacaaaaaatt

SEQ ID NO: 5594 - DNA, 536 bp, Homo sapiens
accacagcacaaagaaagggccaagacaactgttctagtgagtgggagagagtgtactcttccaattgcacaggcatgaccatagttcatatgaactaagttggagatgcctctctactgctgttctagcacttagccagcagacctgcattttactttcccaaggaatagacgaaaggcaaacctttagatgttggtgccttgggaagaatatagcctttggagggccctgggtcagagaagtcctaacagaccataaattctgtcccttcttactaccatgtggtagcactatttagtaactgtcctgcagaatccaatggacgcactcctgctggggaatgtcattccatgttaggcgtcatgttgaaacatattatttcatactctccttctcagtcaatctccatgtcatggtatctaggcatctatgagctttgagaaatatggataaactatggcaaactaaatcaactatctttaatcaaatacattccttttcctgagcttagattaccagcacaaactctcatttc

SEQ ID NO: 5595 - DNA, 558 bp, Homo sapiens
accaatatgcttttctgagctagggctaattatcattctttacttatctacgaatacaccactgcctgagtctatcagttctattggtcaaacgtcatctaacataacaaacatgtcttcataacaaatattcttatattttttatgtcctttaaacataccttctaacaattccctagtttaggtcaccataatcttttacctacattcttgccataattttctatcatatttccctattttgagacagaaaaattattttccacatggcagccaaagtgatttttctataatacaagaataatcacatcactccctcccatcaaactcttcaaatgccaacaattccttccaggttttaatacaaagttcttcatgatttggaaattatttatattcctagaatcatttctccttaaggtttacctcttactctatgtaaaagccccacctattcttctctatgagtcttagaaaacaccatgcttattctcctgtctagaactttatataagaaatctctctacttgaatttctcctcctcttctccttcatatt

SEQ ID NO: 5596 - DNA, 475 bp, Homo sapiens
gtgttgcccaagctggagtgcaatggcgtgatctcggcttactgcaacctctttctcccgggttcaagcaattctcctgcctcagcttcccaagtagctgggattacaggtgcatgctaccacgcccggctatttttttgtatctttagtagaaactaggtttcaccatgttagacaggctggtcttaaactcctgacctcagatgatccacccaccttggcctcccaaagtgctgggattacaggcatgagccactgcgcccggccaggaatttattttaaggacataatttaataggttcaaaaatctcatattcatgaaaactttttgaaacctataatagcaaaaactaaaaatgaggttaaatgtttactaatagaggaaggcttagtaaatcatagtaagtaaaaatgatgaaatatgtagccattaaaaataatactttacaggccacgcctataatcccagcactct

SEQ ID NO: 5597 - DNA, 482 bp, Homo sapiens
attggtaacttccctgtctgatgagttttctccacctccatctatcttgggaaactgcagtccttcaatttaacttcctcatcagatgacagctgcaaaccagaacagacacgtcccaatcctagatgaaccgctttgcttcactgggaaatattaaaaagaacctaatgattcaccaaagagcaccacatttaaagaaaagaaaattatcatttttagtggcaaagacaaaattagatgagagaaaaacctacttcaaacagaaaacaactaaaaacatttttctaaaaatccatggtacatgctacaacatggatgaaccttgaaaatattattttatgtgaaagaagccagttacaaagaaccacatattgcatgattccatttacatgaaatgtccagaatatacaagtctgtagagacagaaggtagattagtggttgccaagggctaggaaggatgagacgattgggggttaatgg

SEQ ID NO: 5598 - DNA, 545 bp, Homo sapiens
tttattcatccacgtgaagtctagaatcacttcactggatcttaagacaccccctcatgaataaaatttagaataaaattaagtcaaacctataaattaattttgaagaaaaatgacatctttataatatgagtgtccttaaccagtacaatggtgtgtcagccccctgatttattcaagtttttatttatttctcccaattgatcactgtcatcttctccatgtatatactgcacaattcttattaaaaagttagtattttggctgggcacggtgctcacacctgtaattccagcactttgggaggccaaggcgggcggatcacaaggtcaggagatcgaaaccagcctggccaacatagtgaaaccctgtctctactaaaaatacaaaaattagccgggtgtgggggtacatgcctgtaatcccagctactcgggaggctgaggcaggagaatcgcttgaaccagggagtcggaagttgcagtgagccaagattgcgccactgcactccagtctggcgacagagctagactcagtctcgaaaa

SEQ ID NO: 5599 - DNA, 561 bp, Homo sapiens
ttgcccaggctggtctcaaactcctgggctcaaactatcttcctgcctcagcctccaaaaatgctaggattacaggcatgagccaccacacctagcctcaaatagttgtcttaacaaataaatggttgaaacctgatatacgggaattagggactctgttttgtgaactgttcatttctggagtcaaaatggctttgatggtgaatttggttatctaacaattgtttccagaagttaggggttaagcagagtgcaccacccacaggccaccttacctgtcctgccttggcgttctcacagacaaaagcttcatagaatctggggaactctggagcattgtcattcacatctaagactttgattgtgacaggaacacttccaacctgggagggattgtctaaagggaacacaaggaaaaccaaatctgagagtttagtaatgccaaaagaaaaaaaaagagtaatggtttttgctagaagtcggtatttacgactgggcgcagtggctcacgcctgtaatcccagcactttgggaggccgaggcgggaggatcacgatgtca

SEQ ID NO: 5600 - DNA, 275 bp, Homo sapiens
tggagtgtcctgcccagaaggcagcatggccatttcttgctgcttttgtgtgtggttgttagaggcagactggggctgagtcggttgttgtgggtgagttggggagcactgtgaggagcgagcactggacatagatctcagaggccaagtgcccgccctgcccatacttggctgtggccttggccaagtcctaagtggcggttagggtacttgtaccataaaggtacagaagagtatcttgagtatgttattatttgtgtggagagagggggcag

SEQ ID NO: 5601 - DNA, 253 bp, Homo sapiens
  misc_feature 1: n = A,T,C or G
naagattggagtgtcaaatattaccaacttatttaccaagaatttggtttttcttaaagtctaaagtgtttactattagctttccacagggatataggagtttgcagaggttgtagttttttaagggaacatcaatgaattttcttgatgcatatgcctgtttctaccattttacattgttaatttgcctctaaaatgagtaactcttacaatggggtttaaaacctgaagactattgattgctaccttgatc

SEQ ID NO: 5602 - DNA, 494 bp, Homo sapiens
gagtatgatgcacagtcttcattttcttgtcctcagtcactgggagggtgatcaagaaagagaaagaaagcatggtagctggccaggtgcagtggctcacgcctgtaatcccagcactttgggaggccgaggcgagtggatcatgaggtcaggagttacagaccagcctggccaacatggtgaaaccctgtctctactaaaaatacaaaaattagctgggcgtggtggtgggcgcctgtaatcccagctgctcaggaggctgaggcaggagaatcacttgaaaccagaaggtggaggttgcagtgcaccgaaatcgcaccattgcattccaacctgggcgacaagagtgaaactctgtctcaaaaataaaaaaaaaaaaaggatggtagccttacaagttctatgccatctatttcaattccctgctttttgtaaacagcataacttcccacatacccccaaaatttatctcaaaattaaacctgcacaaaagt

SEQ ID NO: 5603 - DNA, 520 bp, Homo sapiens
agcaaacacaaagagaggctcaatctcccaaataattaaaacataaattgggccatatttttgttcctggtcttccttgaggaaaatgacacaatgcttagtagcaaatgagaaattattttgcaaatctatatcctcaaaatgccaccaaacatgggtcatgcatcctgctttcttgcattttgatcctattgctatgacttagtgtggtaattatattacaaagctattattcgatgaaatgaaaatggcaaaacaatttaaatgcttgtctaaaaagactctgttagaatgcaattatgagtgaaattacaatggcaaaataattgaaatgcaagtctggaaggcacagttatgaaagcattaaaatgctcctgttggggactcacaacactgagtgaaactatacactcctggggacatatttttaattcactaaagcaggcaacatttatgggcagatgagaatatctgtgctccaattgttctgcagcattatctacacttctaaatgccacct

SEQ ID NO: 5604 - DNA, 565 bp, Homo sapiens
gatcagaggtgtctataccttgaggaatgaggggctctccagagtgatttctgaggcaccatttatgtcaattagatagtgccttgtggaagggacatgagaaaggaaactgtaggttctggtcaagttcctggttacctaagtacacttccaggagtgaatggaccttggagaggccacttggagtgagaggttatgtcacagacttggattggcatcagggaaccatgggagagaactggagatgcatcaagactaatctagtgaattaactccaagaggaatgggtctttggtagcatcctgtagcacacaagagtggtgtactctgtgctctggagagacagaacttagcggggtctctgtgactaaggaacccagggagtagatgatgaggccctatgcagactcttcagtggcaacagttgtttggcattgccactgctgaaggctgtttctgggtgtaattacctctgtgggttgtcattgctgttgagagtgacactttggagccataactgttggaagttgttgccatggctaatggggaaattgtcagtgggagt

SEQ ID NO: 5605 - DNA, 530 bp, Homo sapiens
tcctagttttctcatggcagtgtcttgatcattcactaccctaagtctcctctgggtgctttctaatttactcctaatgttctttctaaaatgctcacctaaattctgtataatctggacaacacatggtacagtagaactattttttgcccatgctcttactgctgtatattactcttactgctggatattaccataaaacctaacattgtattaggcttcaattagagttcacatcagagtgttgcttcatatatttaaaagcacagattttatagcaattaattaaatgaacataatttaaaagagttgctgttaactataaacttagaaaagtctatacataaaaatctttatgaagaaattcatcctcagataccgtataacagcagaatgtgttatatactattatgactgtaattcacagcatacatatactatgtggcattgatataattatggtcacagaaaaggtatatttgttaatacttattttatttggatataaaaacttaataaacatgtaaatg

SEQ ID NO: 5606 - DNA, 493 bp, Homo sapiens
tgagccgagatcgcgccactgcactccagcctgggcgacagagcaagactccgtctcaaaaacaaaaaacaaaaaacaaaaaaactctttaccaaactcctgtttatagaccctcttgaagaaaaacataacgaaaacaataaatggtgatggttaatattctaaaggaagtcatgccaagttccatgttcactttttgttcagaaagaaaaatttcacattacagaattcatagaaagcataaatttcttatgggaaatctatgtccaaaagtttctcagctttctgtttgatgttgcaactaaataagtggaacctgttcattaagccccaccaatgaagtaacagatgccatcactgtccatcaaaaatggccagaatattccataattacacaggcagtaggaagaaaaaaaatggccagagtagctcacgttcctttgaggcctagaactgttcgaatccagagaatatagatatgcttagactcatg

SEQ ID NO: 5607 - DNA, 555 bp, Homo sapiens
atgaaattaaggcaatatagcaattctgaaggaaggtttcatttccttgaaaaagaataacgtaaggccaggcacagtggctcatgcctgtcatcccagcactttgggaggccaacacaggcagatcagcagaggtcaggagtttgagcccaacatggtgaaatcttgtatatactaaaaatacaaaaattagccaggtgtggtagtgcacacctgtaatcccagctattggggaggctgaggcaggagaactgcttgaacctgggtggtcaaggctgcagtgaaccaaggttgcgccattgcactccagcctgggcgacagagtgagacatcatcccaaaaacaaacaaacaaactgaagataactcctttttcttctaacaaatctgggagaagttagtgtaactaattcatgtgcatgaaaggaactttgctgagatgttaaacatccatcagtcaaaagactagctgagactgggcatggtggctcacgcctgtaatgctagtattctgggaggccgatgcaggcagatcacctgaggtcaggagtttgag

SEQ ID NO: 5608 - DNA, 555 bp, Homo sapiens
gcccccgaatccccaggacgtggggcaatgtctggagacatttttgattgtcacaactgggagtggggattgctactgaaatctagtgggtagaggccagggatattgctgtacgatcctacagtgcacaggacagccaccacaaggaactatctggccccagatggtaatagtgtcaaagttgagaaacgctagtctagtcctaagggctggtcctgcatcccaggctcttattcactgagcttccttggctctctgtgcccaggccacagcagcgactttcctaacatccaagagctgttcctttcccaggtgaaagccaaaaagactgtgccatctctgggctcaacttgaacactactcttcacctctgatccccaacttcaagggatacacatgagcccaggcagtggccagcctcaggtccacattctcagagggaccctgcttcctacatgagaggaaggccctttccagcctctgggttttcagtacaatcaccataatatccacatctcaggttccacccacttggcatagggaggacacagggta

SEQ ID NO: 5609 - DNA, 558 bp, Homo sapiens
ggaattcagaatactgcagttaggatctctcagctttttaccccattcccttcaggggactggataagcaattcatactgcgcactaaataactttcttggaaaattgacaatgagtgataatcccacatatctaactattgttcaaaatgtagcattgtcagaagactttgcctagatgagaggaatggaatggaggacctgagtatgagattagtaactccattaacagaacagcttggagggcttgccggttagagattatcttcacagactgacaagtcattcctattttttatgttgccagcagagttaagtctcttagtagcagggatgattccctcttaacaacatcttgttttgttcattttgcttttccaagaggtagaaactgaatttacatctaaattcttggtaagaaaaattcctgaataagatttgagggtgtcaggtcttagaacagagatgctcatctcaggcaaaatggatcctaagggggagcaagccacactagacattcaacaaaaagcagcatcatgaacattttcaacagctcatt

SEQ ID NO: 5610 - DNA, 500 bp, Homo sapiens
gtatggtgatgtgcctgtagtcccagctacttgaaaggctgagatgggaggatcctttgtgcccaggagttctgggttatagtgagctatgattgtgctattgcactccagcctgggtgcccagtgggaccctgtctctaaaaaatacagtgttgttaccggaagacattttgtaagatttctagatagattccatgtctacaggtgttatagacttgctgtcatcaactatgtctgattcaggtaggaagaggtgccaaagtctcttaaaacaccttgaattccaaggtgaaatgagtctgctcaaaaaccaaacatctcttgagtgttcctaagtagcaatttctgtatcccagcccaatgcaatcatagactagcaaaacttacacttgcaaggcatccccactgtgctactagccctcatgtatgtttatacattgtcaaaaatttagctcaggtctgtgaaaaacaattttttcttccagaactgtaataaagtc

SEQ ID NO: 5611 - DNA, 307 bp, Homo sapiens
tggaattacaggccaccgtgcctggcctactgttgctgtttctaagccatatacgtccctcgcccagtgagaaagaataaaatgcgcccttatttgaggaaataatagaaaatgtatttatttggccaataagcaactgtttaaaactgagcaaccctttgtaagagagggctttccaagcatccctattagtcatttacactttagtatggatatgcttctttttctcttacctgctccctaaatattaatttaacacagggtttacatgggggagaaaagaggaatatatggtttttggaggatg

SEQ ID NO: 5612 - DNA, 539 bp, Homo sapiens
tctcagaagagcctttgagagcagttggcctgtgcttagccgtgtccgagacccatggtccagaaccctcctcatatcttgaaagcctgcttctccatttaccagtcttagggccttgagaacaggtctctgaggagagaactagagaggacaattgtgagagtagaggggacaaatggccttcacccctgctctgtgaagtgacccaaaggggcctggactgtgttgtcacttggtttccctagcaggattaggtctggtgtaatacagtaacaaaatgcaaaatagcagtggcccaagcgcctcagaattcactgtctcgtggcagagacgcctagaggctggcgcccagggcaggcaggacccaggtgcctcccattcttgtgcttggctgtccttggtgacagctccaggcagtggctcttgaggaaagaggggtgggaaaaggggaaccctcctgcccaaatcaggctctttaaggaggcttctggaagtctccactacttccagtggtgtagccatgaccagctgtccatgtc

SEQ ID NO: 5613 - DNA, 443 bp, Homo sapiens
tcccacctgggtgacagagcgagactccatctcaacctaaataagaatcgtttcctcaaaaagcttgggatatatcttaggattcactctcgcccacatttcacaaaattatactaagcaacagaatttcatgtttagaagagattttctcagctttcttcttcttttgacctgtcacatgatcagggtggaggaagaattaactgacctgacctaggaggattttctattcatttaaattcataaagttcgtgtcctttgccaaacaaatgtgcataacaagtaaagtatagaatgggtcagagaagctatctggtctcaccttctaaatttaccaatgagaaaattgaaaatagtcagaatcaaaaatgaaatctaatgattcccagatggttgtttcttccactataacatcatattattctcctgcattatcatttaac

SEQ ID NO: 5614 - DNA, 497 bp, Homo sapiens
catctaatttaatatgcttgttttccaatgaatggccagccatttcaatatatactatcattttcttcttcttttaattgtttccttttacagttttatcatatgcttttattgtatactaagtttccttgtatagttaggtgtatttctggatcttagcctctctttttaaaaaaattttaatttaattttatttttttaagacagagtctcactctgttacccaggctggagtgcggtggcaggatcctagctcactgcagcctcaaactccttggctcaagtgatcctcccaccttggtgacctgagtagctgagattataggcgcatgtctcttttgttgattctttttgtctatttctccacccataacacactgttttagttaatgttttgaaatactatatttcaaaatatagtatattttgaaatctaatgctgagagtcttctgttattggttttattaactaaaaaaattattcctatatatggaag

SEQ ID NO: 5615 - DNA, 566 bp, Homo sapiens
tcgttgtgataaggaaaagggggtatagtttgtggtgtggaacaaagttagtcaaaaacctcaaagttgaaaactgatatttcatccactgttggtggaagtagctgacattccagttcccctaacaatgtagtgttggtgttaccaagcagagagctgatcttccatgcttcatctgacagaaaacaggcagtgtttttattcccctggaagacaaatactggtgatgctgaacaaagagctgatctactacctctctggcagaagcaaatggtactctgattcccctgccaggatagtgtcagcaaggtcaaatggtaagttgctccaccacattcatctggtagtgtgaggtagtgctagtaattgttatgatacactcacaccccatataaacctggcagcaatgagattgaatacagtagagcaagtcagggctagtcagcactctggttccctatacccctaatgtcagtgaaaaccagtgagtagctgaccttccatcctcatccacagtcagtgagacagaacaaagggaaacatgatgggactagatggtactcaac

SEQ ID NO: 5616 - DNA, 420 bp, Homo sapiens
tttgagaaatacaagtagaagtaactgcagaatactggattattatgtttatgtcaaaatggaatgaggaaattctgtttagggtgatgaaacattttggaaatagtggtggtggtcggacaatactgtgaatataatcaatgccactgaattgtatacttaagaatggcaagttactgtatatatattttgccacaataaaagaaaagttttaaaaaatggaaagaacttcaaatatcaggtttattggcagaaggagaccacagtcctagttctggctttgccactaactcgctatgggatttggccaaatcttagtggttgatttctggacctacagatggaccaaacccttcatttgacttaagcaggtgaagcaaactgttggaaggtctcatggctagcgtgggcttgaatcca

SEQ ID NO: 5617 - DNA, 601 bp, Homo sapiens
cagtcaatgactaagttcctctggactttcacatggatcgtaatagacaacttcatcctgtttttctaaaaaggtattaatgattgttaaaaacatattttattatttgtaaaaatacattgaatttttttaaatgtaaggaaaataaagatcacttgtaatcccaccactgagaatcactattaacatataaaaaatctgtgtataaatgtaatatacatatacacatgtgtatatatacatgactatacacatgtatgtaagtagcatgtgtgtatatacatgtaagtagtatatgcatgtatatatacctgtatagacatatgtatatatacacatgcacacacacacacatactacttacatagctacacgtatcaatggagttctaaaagaacactttccatgggatggaaataaatttttaggccaggtgcggtggctcacgcctgtagtcccagcactttgggaggccaaggcaggctgcacacctgaggtcaggagttcaagaccagcctggccaacatagcaaaaccccatctctactaaaaatacaaaactagttgggcacagtggcgtgtgcctgtaatcccagctactc

SEQ ID NO: 5618 - DNA, 580 bp, Homo sapiens
catgcaataaatacgttgcatgctgcggaggcagggaaggcattcttctgcatgttgtgtcctgcagtggagggaaaggcattcttctgcaggatgcatgctgcagagaaggagggaaggtgttcttctgcatgttgcatactgcaggggggaaggcactcttctgcatgttgtgtcctgcagtggaggaaaaggcattcttctgtaggttgcatgctgcagagggagagaaggcatttttctgcatgttgcatgctgcagaggaggagggaaggcattcttctgcatgatgcatgctaatccatggacatggaggccatgaaagaggaaggaagaggcagtaacaatgggtactccaatcgcacagcttttcaagcaagtgttgtttgctttattcttttcctttcaaaggagagagaaaacccaaaaccacctccaattacaatatgtggaagatgaaataaaagaaagtcaagttaatttgtggcctttaaaaaacaagaggttgagcatggtgtctcacacatgtaatcccagcatgttgggaggctgaggctggaggattgcttgagtgcaggag

SEQ ID NO: 5619 - DNA, 309 bp, Homo sapiens
gattcatgtgacgggcccctctgcttctcccccgccccatcatctccagcgcgtggtgggggaactgctggggaaggcgattggcatcgatctctccatcccttccgaggcccgacttcggaattgtcttagaagaaagaaggcaagccaccattttacccacgtaaatatatgaatatatttctgacattgaggtgttccagaagatgataaagaaatgatagcagctccagaaataccaactgattttaatctactacaggagtcagaaacacatttttcttctgacacagattttgaagatatcga

SEQ ID NO: 5620 - DNA, 528 bp, Homo sapiens
ttgcaccaacctgatagagatatagcaggcagacacacacacacacacacacacacacacacacacatacaatttcccagagcactactcaccaatgaagtactaatgaaatagctccccctgaaccacaagggtcattggactgcagctccctccctcctgcagaatgaagtccaagctccttagactgacttggccacaagctacctttctggccttgtcctttgtctttgtgcgcattatgttctagtaacttcaaactgcttgtagtttcccctgcacatcatatatctttgcttttgtgcacgctgtttcctcttcctgggatgttttccccactggccttatcttccaagattcagtttaggtatcatctcctctttgaatctctcttgagtcaccaaactgggctaagtgttccctccttgtcatcccacagttcccaattactgtaccccacactcaccacataggattctaattatctgtatagatgttcacctcccagtatattaaagagcttctatg

SEQ ID NO: 5621 - DNA, 553 bp, Homo sapiens
aacactgatccattaacaacttgaatagtttctctgcagatcctgggttttctgttgtataactgaacttcaggctttaggctgggcaccatgactcacacctgtaatcccagcactttgggagactgaagtgggaagatggctggagctcaggagtttgagaccagcctgggcaacatagcaagatcccatctctatattaaaaaaaaattttgagctttagattgaccaggggaagggtctgagccaagaaatgctcagtgatccacatgtatttctttggcttagaatcacaaaaagaaatcaagtacaaacctttgtgattatatactgaggatttatgtattaaaagtaatggaaaagatggcaattacttttacaccaacctatacacagttaattcttaattagtcatggtatgggctagaaagagataggaatactataacataaaacagtaaccgtacataaatcctcagtgataaaagtcattctaaaaattgtggagtgtcctgaaatacgatttccaaataaaaaacaatcatcattggct

SEQ ID NO: 5622 - DNA, 629 bp, Homo sapiens
ggaacgcggttcccggggagactggtacggttgctgtgtgctatggagccgagggtcgtcaagccaccggggcaggatttagtagtggagagtctcaaaagccgctacggactcgggggcagctgccccgacgagtatgatttttcaaatttttatcagtctaagtataagagaagaactttaacctccccaggtgatttggatatctactctggagataaagttggttcatcgttaaaatattctgatgaaagcaagcattgtagaacaccattgggcagcttattcaagcacgtaaatgtgaattgcctagatgatgaactggattctttccatgatttgaagaaacaggaaacagaagaagagttaattgaaaatgattatagagttagtacctcgaaaataaccaagcagtcttttaaagaaatagaaaaagttgccttgccaactaatacgacctcatcgagacctcggactgagtgttgtagtgatgcaggtgactctcctttgaaacctgtcagctgtccaaaatctaaagcatcagacaagcggagtttacttccacatcagatcagtcagatatatgacgaattatttcagatacatctgaaattgcagtgtgaaactgc

SEQ ID NO: 5623 - DNA, 589 bp, Homo sapiens
tatttaaagacacaaagggctggtttcttcatttctcctgattcacgtctgtgcttttgtgtcacttgtgatgctgggtgaaagaaggtgcctctctgatgtgtgctagtcattcccaaggcgacagctctgtcagagataaaaataaggaagtatccttttttatctcctttgagatgctaacaggctgctttccagattgcattccagtctacagttggttagcagatttgtgtactggttccacctgggcatataaattactctctccactcaaagtgctttgtagagcacaagaatttatcgtgtggagaggtaactatggtctgctacagttttatcggtgtctgtggaataatcctgagcttagagtaaattttagcacaccaagcaatttatataacaaccaacctccaattatctaattttcagaaacaatatatgaaacaatgggcagcatttgttaggcacttactatgcctctgagatttggtggggaatgttctgtgacagggagacaaaacaagcaggaagcagccagaggtccacacactagggctaggcaggctgtaaagactctactcagttc

SEQ ID NO: 5624 - DNA, 666 bp, Homo sapiens
  misc_feature 538: n = A,T,C or G
aggggtggggaggagagctctttcagtgttgccttaggtgtgtgtctgtgtgtgtcctaacccagtccttcccacactcccccacgtgctgatcacgtcgagcacctctaaggctgggtctttgcattagaaagctatttgttaggggtacagggggcaaagaaggcacctggcactcatcctcacctccaactcccatgcttgggcaggatgtctttgtccctgagtgaggtgacgagctttgctggccccacagtcttacctgcctggtcgggtgagccaagggggaccctgtccatgatgtctgggccaagatgtccctgttggcgaccctggagggtcctctgtcctgctgctgctcctgtggtcacgtagggggtctgctcctcatggacccaccacccccgtgtagttgtaatgcaagtgaggggttctaattttgtcagctttatcttagtgaaataaaggttaatatcacagaaccgaaaacaaagcttctgctcattactagggagtttcagctactccctttccgcanaacaataaatccaatcttaacattttcagctttctcatgattctcactctctcttctcaggtgagataatcctaacaatattcttggagaaattctatgtgtatgtgtgtgtgtgtgcgtgcatgcat

SEQ ID NO: 5625 - DNA, 567 bp, Homo sapiens
gctcttgagaaggtagaattaagatcatttcatatttcccctttcagttaggagagttcttcccatatctcactcgttgtattgtaatagtttcacaaatcacagatagagacatttagaaataactttgaacataaataattgcattatagttgaaatgtgtacaggcacgtgattcaaaatttgtttactcagataccagaactatttgattctttcaaataccatgcctacaattcacagtttttagaattacactgtgatttagcataagtacatttcagtgaatactgaggcaatgcctttggaagagaattgtttacagcaatctattttcctagactgattgcctagatatttcatatagcttatttatttatatagatgtgaatttagctttgaaatataaaaccccatggggctttacatgtgtgtaaagccctcctaggctatagtaggaaaaaatgtgcacactacaaaggtacaattaaaagccatattggctgggcacgttggctcacacccataatcccagcactttgggaggctgaggcgggcagatcacct

SEQ ID NO: 5626 - DNA, 577 bp, Homo sapiens
tacgttgacagtataaagtgttgaattcaaaatattctgatttaaaatcagattgcagcgctctgagaattaactgaaaggcatagaagtttaactattcaaaccttactaaaaaatgctaagaatgcctgtttatctttactacaataccatagttaaataatagttcagatacatttctcattgactcttcagaataatcttgggaaattgctagtgtagaatttcctttatgggagacacattagacagtggaactcaggttaagtgggctagcagtatagtatatttgaaaaaccaagacagacctgagttcagatcctgactttgaaatttatagccatgttctctgaagggagttctataacctctcctaagccccttctgttagaggataataaaagtagtactgggctgggcacggtggctcatacctataatcccagcactttaggaggccgaggcaggcagatcacctgaggtcaggagttcgagaccagcctggccaacatggtgaaaccctgtctctactaaaaatacaaaaattagctgggcatggtggcacatgcctgtagtc

SEQ ID NO: 5627 - DNA, 574 bp, Homo sapiens
aattctagtattcctcccatgtgcagtattttattttatattgcacaatagataaaatataattttggtttctccttttttattctaaaagagtaaaagcagttatctcaatatgttatgttcattctagtgatgactttactatcatgtactaaatgtgttttgtttaaagtagaagttaacttcacgttatactgatttgtccccccataaaccaactgtatgtcatcatataacaaaagttgttaaaagtgctatataccatataatgttgcatctaaactgggacacttatctgagatgcttttgcgtgggacaaatgctatattagaaatgactaggactggccaggtgcagtggctcacacgggtaatcccagcactttgggagactgaggcacgtggatcatttgaggtcaggaattcaagaccagcttggccaacatggtgagaccccgtctctactaaaagtacaaaaattagctgggtgtgatggcatgtgcctgtaatcccagctacttgggaggctgaggcaggagaatctgaacctgggaggtggaggttgcagtgagccg

SEQ ID NO: 5628 - DNA, 544 bp, Homo sapiens
gacagatggggagttacaactacatagttgattaataatgaaaactccccattgttgcaaaataccaattttcaccatgtaggtttccattataagagcatttcttactccttcccacttttactttaccctaggaagacagatgcagagtgaggttgctttacaaactcctctggttcaaagaatttcaattttaagatacaccattatggtcagtcagccacaagacagaatattaaattaacataaatcactggcaaaattttatattacattaaacatatgatttatgaagagagtggtatagactaggagccaatatagttttaataaaaataagtcatgctaaaacaatctaatttctctttttgattctattggaggaatatgggcaagtgaatgatctagtctcagaggagcctgacaaagcctctcaaggcatctttacgttaagggtaaaatgatggctctctgaatacacagactgcatattacttttcttaatttacccccctcgtgccaggtacacagcagatgcttaaag

SEQ ID NO: 5629 - DNA, 638 bp, Homo sapiens
gggtgcaagcctggacttcttcaggaagtcgcgggccacacagcctctgagaactttgctgatgtgtaagtgactgtgagaaacgagatgcgatgggcaaaaccctcctcagcgggacctccacccacagactcgactccggacacagccctgaccagccaggcgataaccccgtcattgctggcctggggctggggcagcacccatttacccatggacaggacagtgtttccatatttagcaatcagcatgggtgtatgttgcccaccagttgaaagtcaatcccatttgcagctcttttagggtctgagtgactctgaaaggctgcaggctgctgtggactcctgggcagctccttgttctttctccagctggactttctcacttgtccaattctcttcccagaaggagggatcagcagaagggcttagcaacctcgtccccgggcacaaacagccatttccacgggtttatatggaaaactaccaagtggcaccaatctcgataaagagctctctttttcgggttatttagaacgttgtgaacctgagtctccctgttaattccgttttggaagataaagcgggcacctgcacctctctagtaagaatgagcagggcatgatacctgaaaacaca

SEQ ID NO: 5630 - DNA, 622 bp, Homo sapiens
tgaaatggaaaagtgtccagactcttgtgcccatgagatggagtctgttgcagatcatgaaccaaataaaagaatattgggcagagtaaatttgtctttaaatgatagccattatggacagcaagataaaggaacatctctcagagaaacgcaagaaatgactgaaggatcaagactagaaccaaactctgagtttggcaaagaaagtacctttggaatttcctcaaaagagttgatgtcttgccatgatgaaagctctgtttccctaagaagcctgaaatccattgaaataatgccttctcaagaaaattcagaaactaatgttaacagtgaagaaactgacctgaaaaatctttgtaaaccaaaagatggtgaaatgctttgtgaaaatgtaaaggactgcacagtccttcctgagatgaaggaaatagtttcaagagattggagtaattctagtgacagagacagcgtatgtacctgtgtggaaaagaatgcttgcaaagcttgtcaccctcacgagaattcctctgacagacatttgcctttgacagtgaaaacagatattaaagtgaaaggagaagaaaccgaagagcatcagaggggacgactggtttacttaact

SEQ ID NO: 5631 - DNA, 608 bp, Homo sapiens
agactcagtctccttaatgattcttcagttacattctacagcttcattagtagaaccttatgaatttagcaaaaatctgggctggtttactttctgttttttgaaacagggtctcactctgtcacccagattggagtgcagtggtgtgatcccagctcaatgcaacctccatttcccaggctcaagtgatcctcccacctcagcctcctgagtagctgagaccacaggcaggcaccaccacacctggttacttttttttgaatttttattagagatgggtttttgccatgttggccaggctggtcttaaactcctaagctcaggtgatccacccacctcagcctcccaaagtgctgggattataggcatgagccaccatgcctggcctgggcaagattacttttgtattctctatgaggatgagtttgactaagcaaatcaataatgtaaacaaaactgaactacttaagagaaaaaattattctcacacatttaacatatcagttatctttcttgtcatgttaaacatacatgacatacaatataccattttaaagtgtagaattcagtagtgttaagtgcactcacaatgttgggtaaacatcact

SEQ ID NO: 5632 - DNA, 469 bp, Homo sapiens
gactattcttaccagcatttattcttactagcatttgtgacccagaattttcagagcaaacaagcaagcaaaaagcaaaattaatttaaatttcatttataattacttaattttcattcattgaaaagtcatcattctaaaatgagatttctattttaattataattacagatgctccttgacttacgatggggttacatttcttgttttttttttgtttttttgttttttggtttttggagacagggtcttgctctgttgtccaggctggagtgtagtggcacaatcatggctcactgcagccttgacctctcaggctcaagtgatccgtgcccctcagcctcctgagtagatgggaccacaggtgcatgtcaccatgcctggctaatttttgatttttttgaatatatggggttttgccatgttaccaaggcttgtctcgacctccagggctcaagtcatcctcccg

SEQ ID NO: 5633 - DNA, 616 bp, Homo sapiens
ggctaacacagtgaaaccccgtctctacttaaaatacaaaatattagtcaggcgtggtggcgggcgcctgtagtcccagctactcgggaggctgaggcaagataatggcgtgaacccaggaggcggagcctgcagtgagccgagatcaaaccactgcactccagcctgggagacagagcgcgacaccgcctcaaaaaaaaataaaaataaaagtaaataaataataaataaacctaacttcccagggtgtttagaggtcaggatttgacactcttaccaccatagcccaggtttaaattcttaaataaataaaaaaaccaaatggagacatacacaatgctcccgatggggaggaatgaggggtatgatgctgtcactgcctaaatgcgatttatcagcaaacgcaatccagtcaaaatccttctggacttttaaaattagaatttgagggccaggcgtggtggctcatgcctgtaatcccagcaatttgggaggccgaggggggcagatcacttgaggtcaggagttcaagaccagcctggccaacacggtgaaaccctgtctctactaaaaatacaaaaattaaggctgggtacagtggctcatgcctgtaatc

SEQ ID NO: 5634 - DNA, 522 bp, Homo sapiens
atccaattcaggtgagcctcctaaggaacaaagcagaatgcagaaaaattaagagtgggtctagggaataaaatagagatatgcaccagagtatgatgatgtgtctgggaaagaatatacaaatacttttaaaattactagacaataaacctgagatgacactaagacaggtaaatctcatttaatggtaatatattccaagaaacgcatcattaggtgattctgtggctgtgcagacaccaaagagtgtactttatacaaacctagacagcgtagcctactacatacctaggctatatcgtacagcctattgctcctgggctacacacctgtgcagcatgtcactgtgctgaatacagtaggccaatggtccccaacacccaagccatggaccagcaccggttcgtgtcccgttaggaactgggcacaaagcaggagatgagtggctggccagccgagcattactgcctgagctccacctcctgtcagatcagcagcagcattagaccttcacaggagcgc

SEQ ID NO: 5635 - DNA, 597 bp, Homo sapiens
caacctctgcctctcaggttcaagccattctcctgcctcagcctcctgagtagctgggattataggccagtgccatcacagctggctaatttttgtatttttagtagttacggggtttcagcatattggccaggctagtctcgaactcctgacctcaagcgatctgcctgccctggcctcccaaagtgctgggattacatgcatgagccactgtgcccagcctgctggtgggagtataaactggtacagtcacattagatatttagcaggatataatgaaactgttgatgcacaagtactcaggcttggcatcccacccctcagtacatacccagggataccctcacatgagtacacagggaggtgcatgaatgaaatgtccctagctacaccgaggggctgtagtaaaaaacgggaaacaggctgggcatggtagctcacgcctataattccagcactttgggaagccgaggtgggaggatcatttgagcccaggagtttgaaaccagcctgggcaacaaaggaagaccccgtctctgcaaaaaaatttaaaaattagctaggcatggtggcatgtgcctgtgatcccagctactt

SEQ ID NO: 5636 - DNA, 528 bp, Homo sapiens
gaagaataaatgtaccttcccttaaaaaacttattaattgtagcacatcagtcttagtcatttttttgacctttctctcaatttatatttaccctggatacttttcttttgtcttgtttattttaagcatggcttaatttttcactggagcaagagcttaaaaacgtcagagtaagaagagaacaattacatttgtgacagttatcaattacttgaacattattcaagatagaatatattttccaattaatgttaaaaacagaattgtagaattacttttgagtttgattcactttgagaaatctaagaaaaaatttaaaaatccattctgtcaccttttcccccgtcatgtagggatgttcttaaagtcaaagagagttgctgtttggaatactctctgactttgaagcctgtggaaaaccacttatgaggtacagggagccttatgttgagttattttcatttgcatctccatatgaaaaagcaaatggaggccgggcacagtggctcatgcctgtaatcccagca

SEQ ID NO: 5637 - DNA, 399 bp, Homo sapiens
tggtttttgcatgatgtaaatggattttatcagagaacgctaacgtatgaatattgtttgccattctcatgaccaatacacataataggaaagactaatcagatcttgggactctttgaataccatatgtagccatagaatgcctctccatacagcagtctaggaatatactaccaaactactattattgtcttgttagttaaaatctacctatgtctagactggaggactacaatgtcaatttaagctttgtgatttcagttgtttaataagtttggcagatctggttgaccttaacaatatctgtaattacaggagtctctgattaaagtatatgaattatttgaaggcaaaaactataccttatatttctttgtacctgcaaagttctcaagttat

SEQ ID NO: 5638 - DNA, 531 bp, Homo sapiens
acctattgggtattatgctcactatctgggtgatgggtttaattataccccaaatgtcagcatcatacaatatatccatataaaaaaaaccctgcacatgtaccctctgaatctatatatatacacagagagagatttttagagttatacaataatttattatctacacagcacatgtaaggtagatagaaaatgcattactagttccacctttatcaaatgtaaagctggaggtttagatttctcttaccttactaagaaaactaaacatcaaacccaagttgagtttattaaccttcatgatgcagaatcccaattttctatatgaaactatgagttctcttatggcaggagttatgatttctgctattttctcaaatactctcaaactcggtgtgtcgctgtagaaggtgcccacaaatgctgagccaatttttaatactttgagaaatataggactgacgtatttttgatttaggaagcatgttaggtgtttctgttatattatctcactgggaagtgtaccacatt

SEQ ID NO: 5639 - DNA, 545 bp, Homo sapiens
gtaagtagaaatggataagcccccaaatattatagacatttcaaacacacgtctttcagcaatagataaaagaaaaaattaaagagtaagtttcaaaagaagctagtggattttaaaaagggcaaatattatataaggaacatgaatattataattcatgttattttcatgttcatacagaatacatacaaaaattaacattttctagaccataccacaaattcaaacaattttcacggaaataacgtgacacagaatatatttcctaaacaaacagaaatgaaggcagatatcaatacaaaaatgaaagttagaaacataagtgtaataatattggttggaagctattttaatgaatattgaaatattttaaaggtgaatagtcaatacaaataaaccaaacacttttgtaaggccactaagatgcatgtgtaatgtgtaatgcctccttttataaggagtaaatctgtagcatcacctgggctatttgacaactgcaaagtgaatgtgagaaggagagaaacagagagagagagagagataaa

SEQ ID NO: 5640 - DNA, 447 bp, Homo sapiens
aggtaaatacaaatccacattcttttcaaaagtaactgcatgaacatataaatgttagtttagaaacagactcgtctttcgacaaagagtatgaatatttatggatcttagagctctttggagattcgaagacaaaaatcccttgtccctgcattcttaagcacaataaaaaggacaacaatatttcattaattctgtctattttgcatctaaggtcagtatggatcagtgaactggccaggcacacaagttaaattatctgttctttgaattctcaatcaacaaatacttaacagtgcacccttgccaatacaatctcacaagtttatgacgtggcaactgccctcaagcaagctaagggggacacgacaaatagacttacataagtctttatcattaattaaatttcatttcaagaatggtcacaagggagtatttagatgtatc

SEQ ID NO: 5641 - DNA, 624 bp, Homo sapiens
catagaatctgattaaaaaacaaagtactagctaggcatggtggtgtgtgctgtattctcagctacttgggaggctgaggcaggaggatcatttgagctcaggcgttccagctatgatcatgccactgcactccaacctgggtgacagagtaagacccagtctctaaaacaaacaaataggccaggcgtggtggctcctgcctgtaatcccagcactttgggagactgaggtgggaggaatgcttgaggccaggagttcgagaacacctgggcaacatagcaagaccctgtctctacaaaaaataaaaaattagcttggtgtgacagcatgtgcctgtagtcctgcttacttgagaagctgaggtgggaggatcacttgagccaggtaggtcgaggctgcagtgagccacgattgcagctttgcactccagcctgggtgacaagagtgagaccctgtccccccaaaaataaaaacaaaaacaaacaaacaaataaaacaagggtctggttaactatctcacaactggaaaaccaggcagtcaattaaaaaggatgggcaggagctgtatgtgctgatgagaaaaaatctcatggagaaccctgcatttacagaagtacattgag

SEQ ID NO: 5642 - DNA, 560 bp, Homo sapiens
cggctgcgagagacgacagaggggataaattacatttttttttaaaacaaagactaattataaatgaaaaacattcataagacaaaacaaatcttatggtaacaatagcttgtagaaccaagtggagtgatatcttccagttactggggttaaataactttccattagaattctgtgcttaattaaattatcatttcagaatatgaacaaatctttaaaagtttagatgataaaagcttaagagtattttctactttaacaattatagatacaattctatataatagttaataagaaatgatatggaattgggattgtatgaatagtcaaagcatattatgcatttttaagtatagataaatattttgaataactttactttgttagaaaaaaatgtatatttaagtaagtaaaataaaatgtagtaggtgttcactaaatgaaaagaaatataatctatacttccaaatcagcaaagaaaataaaggcgaattttgacagtggtagcctttatttcctttgctgatttggaagggcaagagggtgttgatgaggtgctg

SEQ ID NO: 5643 - DNA, 609 bp, Homo sapiens
atctcgaggtcaggagatcgagaccatcctggctaacacagtgaaaccccgtctgtactaaaaatacaataaattagccaggcacggtggctcacgcctgtaatcccagcactttgggaggccaaggtgggcggatcccttgaggtcaggagtttgagaccagcctggccatcatgatgaatcccctgtctcgataaaaatacaaaagttagccagacgtggtgatgggcacctgtaatcacagctacttgggaggctgagacaggagaatcacttgaacccaggaggtagaggttccagtgagctgagattgtgccactgcactccagcctgggcgacagagtgagactctgtcttaaaaacaaataaacaaacaccttcaaaaaccataccttattttatcctttatcctgtgcatccttgggttctcaaactcctgctgtagtgttcgtgagtgacacagtgatgacttctttgtcttacatttttagtatctttatttaggtatctaaatatttagatatttattaaaagatactaacacttattaaaaagtattgttactttatttttatgcttccttgcatctttaaaatactgatgatcttt

SEQ ID NO: 5644 - DNA, 592 bp, Homo sapiens
tctcaaaaaaggcaatctaatttgctgaacctacaatctagctgcaaaggagtcttgcaaatttagtttttggctttacagcctcttcagtacaataaggcacactagagacagactggaatagatactgaacaccacatactcatcaaggtagaaaagcaagcagataaaccaacaatattaggtctgaggcatgagtggaaaaaaaaggagaccaaacaaaggaaacagcacaaaggaaggagtgatttttttgtgtgattagagaggcaatatctggggttgaaggatgaatagagtctaaagaggcacatagaagaaaaacattctaagcaggaaaaacagcatcagcaaaagtgttagtgcctcttcctgtcctcattcctgaaagtgacaacaaacatcttgggtgtcaatttcctgttctataaggaaagtaggggaagctgtaaagctttctttcctttaataattattaagtaccttcaatggtctctgcaaccagagagtatgtttaaagaatgcaggtctgttttgtgtcatggatacaggaatatgctgagaggagcacagtagggagagaggaattaat

SEQ ID NO: 5645 - DNA, 424 bp, Homo sapiens
tcctgcctcagcctccccagtagctgggattacaggcatgtgccaccacacccggctaatattttgtatttttagtacagacagggtttcaccgtgttagccaggatagtctcaatctcctgacctcgtgatctgcccgcctcagcctcccaaagtgctgggattacaggcgtgagccactgcgcccagccccatctttttcatttctatcctcattattaccacccttcttatcgtcagcaccaccaccaaaatggacactcattcattcatccagcgagaatgttctgaatatctccttcatatttgaagatgataagagctggtggagtgcggggtggggcgggggttaggaaatacaacagggagaagcagggaggaagagaagtgaaggagttggaggccaggtgcgatggctcacacc

SEQ ID NO: 5646 - DNA, 518 bp, Homo sapiens
gctcctcccggggtttgtagcggaggaggagcgggcgccatggcggttctactggagaccactttaggcgacgtcgtcatcgacttgtacaccgaagaacggccgcgtgcctgcttgaatttcttgaaactgtgcaaaataaaatattacaattattgccttattcacaatgtacagagggattttatcatacaaactggcgatcctacagggacttgaggcagaaaaagtcccaagaattaagcacaagaagaaaggcacagtgtccatggtgaataatggcagtgatcaacatggatctcagtttcttatcaccacaggagaaaatctagattatcttgatggtgtccatacggtgtttggtgaggtgacagaaggcatggacataattaagaaaattaatgagacctttgttgacaaggactttgtaccatatcaggatatcaggataaatcatacggtgattttagatgatccatttgatgaccctcctgatttattaatccctgatcgatcac

SEQ ID NO: 5647 - DNA, 542 bp, Homo sapiens
cccagtctagaaccctatctagcctctgtgcagatagagttcgtacccaggtacctcttcataccctggatgtatgaaggatctctggctcagaggcttctggaaggtgtgctgctcccacttactctgtgttctggtagacgcccactgagatgttcagcccctccagctcttccttgagcatctgcaggtctgagttgacgaagctcagctccagccgcacttgctcccgcacctttgggtttgcggccactctgttcaaagagaagagggagagaagtgccctcagccaggtatcccagcttctgggtgagcagacccaatccccagtccctgcagggaggatcagggcacggcttgcagaggagggccgggagtgtcgggtaaggtatcccacggacacagagcacctgcccagcttgcagcacacctgccagtacgtggagctggggacacaggcaatgacactgtgagctgcagacatgaactctatgacatcctacaaaaactctgtcttgagaagagaaaacaaaactgctcct

SEQ ID NO: 5648 - DNA, 591 bp, Homo sapiens
ttccacctaccagtctccctttctcaattacattctatttttcatcttgtggccagaatagtattttctttcctacttaaaacctttcgctggtgctctgctgtccctgggataaagtttgaatggtacatgttcttcgtgatctggctcctgctgatctttccagctgtgcctgtctaaaagtcccactcttcctccttcccttcccagcatccaagtctccacagctgagctcagacgaacttgggattgcactccatgtgaatgtggtcttctgccttagtcgctcttgtcctgtgctgctcccccaacaatagcttaccttgtgatgaattctgacttaccattaaggtatccccctggacatcacttcctgagattggtgcctctcctatgtatttctgaatgtgtccagtgctacctgcttattagttggtgcaccccatttctaagctggtaagaaccatgccttattcactgttatattcccagcatctaaaatccttcctgccacattgtaaggggttctgcaacacttgaataaatgaatgaataaattactttctatataatagttcagtagttctgaat

SEQ ID NO: 5649 - DNA, 515 bp, Homo sapiens
taacacagcaaataattccctttggcccttgctctttattgccttccaaatatggaacaaaatgcttaccattttcttcctcactgtctagtcaaacttactcatcactcctcctaatcttatctcattcagccattctaattacccttctgtgaattcctcctggctgtctacatgtaccaagacttccgagcagagtctcatcagagaagtagggtatctaagacatactttatagaggctacaatttgaataacaggaacaaagaagaaataactcctttgtccaccttcaaaacttttgatacactgcaagagcctgtaatttgtaaaccatttaatctcacaggggggacctaggattctcagagtccgctccatcagggcaactatttacagcagactttcctcagatatacttgttcactttgtgctactccctttgatgtaggtataattaagctgattgcagccccagttggccactatgttcaaagaaaaaacccagtagcaatt

SEQ ID NO: 5650 - DNA, 657 bp, Homo sapiens
gtgcatattaaaaattatagattagcaagccacaaatttctgttccgaaaaatgttttaaagtaatgtggctgaagtattagattattaggaatattttgagtgttctaacaagagtgccaaaattaatttggagagtaacgactgtttctactctttggactcttgccaacatttgtgggtaaggtttaaggagaaggtgcctatctttcccacctcactcagtagtagttttctcatccttgtaaaatacttagggagattctgtgttgtattgcttgaacctcacaggtttaaaagacaggaaggtgaatttttgcactcaaagaagttatttactaattttagaatagagactgagggaatacaataagcagagatagagtgatgtgaatgaataaggagtgtatgtgagagagagtgagcacaggtatagcaagagattattgtcatctccctattttatataatcaaatagttgaaattctaaaaattcagtttatttggccaaagattaatttagtcagtcacaggtatttgttatgaatctgttatgacctaatattgcgctaggtatcaggaattcattcagtagtgaaccaaagtgcctacctttatggagcttacattgagtggtggatatcaataaatagtaagc

SEQ ID NO: 5651 - DNA, 487 bp, Homo sapiens
ccttgctcctggggacagcccaacactcagaccacgagttcctgatgcattattgtgagaggtttctgcacgcagccaggtggcatcaacgggacagtgagtaggggagccccttcctaacacccttagggaaagagtccctctgtgcaggaaagcaccatgccctagaacaggctagggatggagctgcattccagagtccatctccatgtctccgcacttccgtttttctccacgagctttttaaatttagtttttgtcaatatgtgtccctctcattccagcgacatgccttctgagatcacctgccaatcgtcttaaaacgatggggagtcgttacctatagtttcagcaccatgtatgggctatatttcattctttcttccctgcactatatgaagtgcaacttttatcatcatcacacacacgtatgtgcatgcatacacacacgcacgcacacatgcttgcacacacatgtgttcaagac

SEQ ID NO: 5652 - DNA, 454 bp, Homo sapiens
ggcacaaaatacacacaaatacttaacatacacaattttgcataaaatctcagtgagttgactctctaagacatatctagagatctaaggactccagatgaaaagcaactatcctaacataatcccaattatttcaagaaattaaaccaaattctcaaaacaaatttaccttcagtttacttaatttgaaaagtacttgtatgtattacttaaagtcagacagacaacaatattgtgatgcagttataagaaagtggcctgaccttaggtgaaggaactccagaagtaaaaattgatgtctgacaaagatcttcttacgtgtagtaaatgaattctgctctccaaatatgaagtgaaactgcatcaattcaagaaatgcctacaatcccttcagcatggtggttccactgaaaggcccttaagaataacggatattttactcacatgttttgag

SEQ ID NO: 5653 - DNA, 486 bp, Homo sapiens
  misc_feature 449: n = A,T,C or G
cgtattcctcctgcaggaggaaatcctcccaactcccttgtaggtgctgaaggaactcaccttctctcagacctcgtggctacctggagagcccctgggattagctgagtgaacacagatggtaggaaccacactgccaaccattgtaagaatgaggaagctcagtggatgatggctgctttccatctctcagtcagaatgtccccagtgaaggacaggactcaagggtcaacacaattggccaaactccaggcagtcaccttagtactggctgcctgactgacacagggccgcatcttcatatttgttacaaactatggtgccactggctgagttgtccctttgagggtcaaggactctgggactcttgcctcacagagacccaaacttaaatcaaaaccagagggctgggcatggtggctcacacctgtaatcccagcattttgggngtggatcacctaaggtcaggagttcgagaagagcctg

SEQ ID NO: 5654 - DNA, 107 bp, Homo sapiens
caaaatgaaacataagcaaccaggcaacagaagaaagtagcaaaaggctattcctccccagaacctgacattcaagactcctctggaagtgaagctcaatcagtaaa

SEQ ID NO: 5655 - DNA, 570 bp, Homo sapiens
ggagcccccctgaactcaccccattctacacctagattctgcccaccctgagattagaaggtttgggccctagattacattggcttcaggaccatgaacctcctgggttgtcttgggcacaagaggccacaccaaagctttctgactccccccaagtccacttcacttcccatggcctgccctggcccaaccccctcccctgaacctagggccatggattaaagattagtggactcctcatagacccctgggagaggcaggacaaggggtggattctaaacaaaaccagtctgggcacagtgactcatgcctgtaatcccagtactttaagaggtcgaggtgggcggatcactctaggacaggagtttgagaccagtctggctaatatagtgaaaccccgtctctactcaaaatacaaaaattaaccgggcatggtggcaggtgcttgcagtcccagttactcgggaggccgaggcaggagaatcgcttgaacccaggaggcggaggttgcagtgagccgagatcgcaccactgcactccagcctgggcaacacagcgagactccgtctc

SEQ ID NO: 5656 - DNA, 643 bp, Homo sapiens
cttataaatctttctagaaacacattttaagaagatgttaaaattgaaagcaaaagttctctttaggtgataaataaaatgctaacttattaaccgtattatggcttccttaccttaaaattgagcaaacccattgcagtttccacaaaagggattaaattcattggttgttcaagttttcggccttttaagtggaatgaaaatttgtctgcaaactaaaatcagaagtgtcataggtgattagtggggaaaaaatgtacaatcacggaaatgtagacccagaagtagtatttaagtcaagtctttgacctgaggaagtaatatccaagcctctttcgtccacacaaaagaatttttttaaaaaaataagaagaaagtccaaagaaaaaggtaatgaagttcccaccaaactaaatagtaaaatcctaagcattacaatttttttctcccaaaggagcaacttgaggcctaggagttagaactggaaggagagagtataaacgctttccctgaaaacgcatttacttaagacctcttgccctcgcttcgttaaatgcaaatggtaggcccttaaaacaatgaactcttcctctacctgccattctgtttttgtttcgtgcccagcactgacatcagtgcaact

SEQ ID NO: 5657 - DNA, 435 bp, Homo sapiens
atacttcagttctcaagaactctcaaaccttctgttttccaactgccacctatctatatctataccgtatatatgtatatattttatatatgtatgtgaggtagaattctgatttttttttcacataaacaacagaactgactgctggagaggagtgtgcagcagagacagctgagtgaagaacatggttcaataaattaagccttagagtggatcacttgagttcaggagttcgagaccagcctggacaacatggtgaaaccccatctctaccaaaaatacaaaaattaactgggcatggtggtgtgcatctgtagtcccagctactcaggaggctaagccaggagaatcgcttaaatctgggaagtggaggttgcagtgagccaagattgtgctatcgcactccagcctgggtgacaagagcaaaactctgtc

SEQ ID NO: 5658 - DNA, 623 bp, Homo sapiens
  misc_feature 524: n = A,T,C or G
gaatggcaggaatgaagtaggcagatggcagggatttgccatggagccatatctggggctcttatgggacttgcctcttccctgcctctaaaatttcaggtttggcaagtattggtgaggatgtggagaaattgaaaccctcgtgtgttactggtgggaatgtcaaatggttgcagctgctgtggaagacaatttggtggttcctcaagtggttaaacacaaaattcccatatgacatagtagttccacacctagttctaggtctatacccaagagacttgaaagcagggacttgaacagatacttgtagcttaatgttcatagtagtgctgttctcagcggccaaaaggtggaaacaactcaagtgtccagcagttgatgagtggataaacagaacgtggtctgttcatatgccatactgtttggttccatcaaacaatatgtgtcagcattccattcctctttatggccaaataatatttgccaagtattgaatgaaccatggatgaaccttgaaaacattntaaatgaaagaagtcagacacaaaaggacaatattgtatgattctacttatatgaggtacctagaataggcaaatacacagatacagaaagtagaatag

SEQ ID NO: 5659 - DNA, 528 bp, Homo sapiens
gttataactaactagtattatattatgctcttggcctgattacagaagggaaaggggctatcataccagacaatggcagaatgaagcaacaaggagtagagttacagaacatgatactgtaactgggactggaggtactcttttagagttaaagaatagtaaactggacaaaatatatgaaactttttttgaagtactgaacatcaggcagcacagtactgtgctccgcaagagaagagaaggagccagaatgagtcctgctttattcccaggttctccgtgacagcagtagagaggaatcccagagagagcagacattgtcattgcactgaggaaccagataaaaatcaaaaaaggttaagcagctggaatgtgtagtagaagagaacgtttacagaaaaaggaaccaataatcagcctaaggtttctcccaagtccctaagtcaaaggtacataggatgaaattctaaggagctcagcaaaagactctaccacggagttggaagaacacttccctggcatcacatg

SEQ ID NO: 5660 - DNA, 609 bp, Homo sapiens
caggcgcggtggctcacgcctgtaatcccggcactttgggaagctgaggtgggtggatcatgaggtcaggagatcgagaccagcctggccaacatagtgaaaccccgtctctgctaaaaatacaaaaattagctgggcatggtggcatgtgcctgtcatcccagctattcgggaagctgaggcaggagaatcgcttgaatccgggaggcggaggttgcagtgagtcgagatggcaccactgcactccagcctgggcaacagagcgagactccatctaaaaataaaaattaaaaaataatctagttacttcttttatcaaaaagaactcacaatgtatagacatgaacctcattaaaaattatgcccaatactttgggaagaatatttgtgcagcaattcataatgaaaaagcctgtcctggccaggcatggtggctcacgtctgtaatcctagaactttaggaggctgaggaaggcagatttcccgagctcaggagttcaagaccagcctgggcaacacggtgaaaccccgtctctactaaaaatacaaaaaattagccgggcgtggtggcatgcacctgtagtcccagctacttgggaggctgaggca

SEQ ID NO: 5661 - DNA, 533 bp, Homo sapiens
tgaagatcgaaacagctgagcaagttggcagaaaaggaagtgagtatgaaagctcaggtacagaaaaatacgagtgctcacttttatacaatgaaatagcaactaggtcaatggaaaaacgtggaaaattaccagagatgatatctatttctgtggaaaattgaaggcaatttgaccactttttcattattgtatttcacaactaggtattaccttcctaagtgactgttgagtatatatattttccttcaaccatttatatataaatgttcttgcttctgacttaattttgggggaaatgaaaggatatcatacataggaaggaagagaatgaggaattgggaggtgacgagaagaaacaagttgaacaggagtaggaagcaagtactgaaaagaattgaaaagaactgaaaagcgcaagagcaaatcattagtttacacattttgactttcccccagattcttggctctgtaggtcctaaggaagatctttttgttttcctggacaggatgatatgagggtgaagctcaag

SEQ ID NO: 5662 - DNA, 453 bp, Homo sapiens
aagttagaagactgagtaagaggtcgaaagggatgggagttatgtgtagggactgaaaacaggtttgggagagcttaatgtttgcttttatactatgactcttcatgttttctcttcaaccatcctaaagaagtctgataatggaaaggcactcgctctgcagtggccaggacaaactttgtacaaaatctgtcatatgatgaggagtaggaaatgaaagaaacggataggaaatattcaggaaaatggagtataagaagtgtgatccagttatgggagggcactggagaatttacaagcattacagtgggaagttttattccttagtggaattgcaagtaacatagtgccttaagaaatttgaatcatttagcttatgtacttaatctgagtcatttctgacaatgttatctaacttcctcttcccccaattcaatttaaaaaccacacatt

SEQ ID NO: 5663 - DNA, 649 bp, Homo sapiens
gaagcctcacaaaaggagcatcctgacacatatggtgacagtaccgtcctagcatggtctcaagagcgggagtggtaacccgcaaactttcagaccttcagtatcctgttggcatgaagaaggctgaccctgaggcaggatggatgggtcaggatgcttcagcccgatgttattaacattcaagtcattcaaatttcctgatcccatgctcaccaagcaacctcctgattattatctggctctgcacatagacttaattacaggaaagataatacactggccataaggacttgaataatctgaacaccatgacagttatttcatattgtggttgaatagacaggcagttggccacaatatatctccctacatagctgctgtctccaaggggagaatttgctgcttatgtgctgggtctcagggaaaagataatgactgtagcaggtaattgcactgctgcttactacgtggctggcactgtctaaatgccttacatgtactacttcatttaatttttatgaccatcctatgacgtcaataatcaggctgattttacagatggaggaaactcaaacacatagaagctgagtaacttgcccaagatcatctcagtctgttgggaaggaaactggagcccagagtccaggta

SEQ ID NO: 5664 - DNA, 543 bp, Homo sapiens
ccctgccccgccgccacacacacacatgcacacacacacagttttcttctcctacttctctctcgcttggttgaattaccccactgacagagagaaaaacaacattcactggcctccagggaaagtggtgtcgctgcgaatgaagggtggatagaggtggtgaaccagaagacatgctctgtgttggctgcaaaggctctggctctgtcatttccccagaatgtcccctgcagatgcctggcagtggaagatcagcagtgaagggcaggagagaggcagctatgcaccagctcttctttggagatactaccaaaggggaacatttgagatgcattcaggtctttttaaaggcatttttaaaccatatgttaaagaaccaaacaaagtggatatggatcgcttacgaagtaaagccagttcttgccttcgctttagaaaatgcttccctaggctcagagaaaccttttaaagtgcccactctgtggaccctccacttcatgtacaggatgtacaaaagaacagcacagcagagcagggcactga

SEQ ID NO: 5665 - DNA, 440 bp, Homo sapiens
gcttatcaaacgagacacagtgatgatgacatttttgaacacagattaattgtgccaccctctcttatttccttcctcattgagcatacaaatgagagaggtacaatttcaggtaactttgcaaaaaggaaagaaatagaatttctgagccgggcgccgtggctcatgcctgtaatcccagcactttgggaggccgaggtgggtggatcacctgagattgggagttcgagaccagcctgaccaacatggagaaaccccatctctactaaaaatacaaaattagccaggcatggttgtgcacgcctgtaatcctagctacttgggaggctgaggcaggagaattgcttgaacctgggaggcggaggttgtggtgagccgagatcgcaccattgcactccagcctgggcaacagagtgaaactctgtctcaaaaaaaaaaaa

SEQ ID NO: 5666 - DNA, 521 bp, Homo sapiens
aagcaggttgatgatagtaccttggtgggtggggatggtatatcttcatctagggggtaggaacaaagacataaaagtgcttagaggactgtttgagaggtaaagatattgtcaacttcatggaatctactgaagataacatagtttcaggagaacattggcaaatatagggtgacctttaagagagtgatgggagagggaaactgattgcagggggttaaggaactaataaagtaggctgggcgtggtggctcacccctgtaatcctagcaccttgggaggtcgaggtgggcagttcacgaggtcaagaggttgagaccatcctggccaacatgatgaaatcccatctctactaaaaatagaaaaattaactgggcatggtgtcggtcacctgtagtcccagctacttgggaggctgaggcaggagaatcacttgaacccgggaggcggaggtggaggttgcaatgagccaagattgcgccactgcactccagcctggcaacagagcgagactccatctc

SEQ ID NO: 5667 - DNA, 455 bp, Homo sapiens
ttttcaggaagcggtattgagctggaactggaaagttgggagcatcaacatgctgaatgggaggtgcgggtgttccagacacgtgggctgtacaggcagcgctggcggtgagtgaaagcgggtgcctgcctgagacgcccaaatgttaggtgtggccattgctgggattcaggtgggggcagtgagagagagggagagaaggtgactgtgggggacttggacaccagataaggagctcgagcttcatttggtagtaacggcggaagcatggagggcttttgagcagagacacgtgtgattggagctggcggtggtggttgggacagattgaaggaggggatcatggtaggcaggtatgaggtcactgttctaggctgggtgtggtggcttattcctgtaatcccagcactttgggaggctgaggcaggaggattactcgagcccaggagtttgag

SEQ ID NO: 5668 - DNA, 427 bp, Homo sapiens
ttctttgctattgtgaatagtgctgcagtgaacatgtgctgcagtgcatgtatctttataactgaatgatttatattcctctgggtatatacccagtaatgggattcctgggtcaaatggtagttctgcttctaggtttttgaacatcttgcaacctcaatctcttagtggttctatcccctctccctgaagatgtctgtgatgcacttcttaatcctgtgatccctcctggcattttatctgtagtataccctgttacaatcattcaacagctcacgtggaatgtcttctacctaccaaacatattaatagatgtggcttacactctaatgttcctacacaatgggcatctaaacaaataataacaataatgaaaacattctatattgccttttgatgtaaatagttatttatgcagatggctctc

SEQ ID NO: 5669 - DNA, 500 bp, Homo sapiens
gggcattatgggcaggggctatagcaggcaaaaacggcaggcctgtcttatacctatgagagctctgtcccagggaaatgcaatgctgcttctggcccaagttgtcaggctgaggtaggtggctgtgctggaggctcaagccaggaggccctgaccagtgaggagtagaaggggccatgaccaacattaaaaactatatgactgcttttccagaaggcagcttgccctgtgctggaggcccacaacagtcataacactcttcactccctcctgaccttgaaggcagttgggtagtggctggagctgcaatagcagcaaaaacagcagatatgtctattgcatctgggagcttcatcccagagaaatgcagagctgctgccagttgaagaggtcaaatgggtgtttcatggctgttctggagttccaggtcagtgtgccttgcctggagaggttaaccagaggcaaggcatgaagtccctctgctcctcagaaccatgaat

SEQ ID NO: 5670 - DNA, 435 bp, Homo sapiens
tatgacagctacagcattcagggtgtgagtaaagagaccgacatgatggtcaggtttctaatggaagcgcaatgtgaaaagttaaacatgactctttatattgggtagaataagaggatcctggtccttaggcagactccaggagttttaacatcccatctaagaatccaagtactgctgtagcaagcgatggtcttcaggagacccctcccatcctggctccagggcactcactttgcattctctccttagctccctgtcctccaactgtttttagctctatgtggaaaatccaccaaatgatctcgtttttgtttaccactcaacctcagcttttggtgcatccgtggtttgaggtcccctcccctgcctctttcccttcatggtcctctgcccccacagacctccatctcctcatcatgttgctctgtcccc

SEQ ID NO: 5671 - DNA, 593 bp, Homo sapiens
ttgaactcctgaccttgtgatccgcccacctcggcctcccaaagtgctgggattacaggtgtgagccaccgcacccagcctgccaattattacttctaaaattcttcctaaagggtggccaaattagttttcactgacttctgtttaaaaattcaataagactctgaactaaagactttgagtgaagagaaatgatacattgtacatttaaaacctgtgtcttttagacatacagccaaaaagcatatgaaaaagtgctcagtatcactaatcattagagaaatgaaaattggaaccacaatgaaataccatctcacacaagtcagaatggctattatatgaaaaagtcaaaaaacatgctggtgaggttttggagaaaagagaatgcttatacactgctggtgggagtgtaaattagttcagccattgtggaaagcaatgtggcgatttctgaaagaacttgaaacagaattaccattcaacccagcaatcccattattggctgtatacccaaagggatataaattgttctgctctaaagatacatacacacgtatgttcatcacaacactattcacaatagaaaagacata

SEQ ID NO: 5672 - DNA, 605 bp, Homo sapiens
  misc_feature 499: n = A,T,C or G
tacggggcacccttggctgccttctgtctctatcactagatcttttgggccctttgttaaaaggcaattattttaggtactacctatctccacaaactctcaagcagagtttggcaggtattgaaaacgttcagactaaatcttttggttggctaagaaatagttatacagtacagagcctgtagattgcaagggttgatgggtagaatctgaagatctttgaactgggtaggaaaaattatatttttattttcattaacctctaacccaaatgaatcattccttcaattatgcatgtaggtaataaaacaatattaaccacattcatgactatgttatcaatacgaatcacaaatgttgttatattatgttatttattatagctatctctaaaaatcatatttatcaccactttgatatcataatgttcacttggcttgcctctagatcttgttatttcatgcatgagtaaagaagcgtatatattattatgtcacanatctttttttaaaaatattttgaggctgggtgttgtggctcatgcctgtaatccctggactttgggagactgaggcagacagatcacttgaagccaaaagttggag

SEQ ID NO: 5673 - DNA, 110 bp, Homo sapiens
gatggataatacagatgctaataaagataatctgtcttttcagggaagacatattcaggtgggagagaaataactaacctcagatgtgaaatggggatatagcagatgct

SEQ ID NO: 5674 - DNA, 400 bp, Homo sapiens
tgcaggctggtcttaaaattctgacctcaggtgatccaccctcctcggcctctaaaagtgttgggattacaggcatgggccaccatgaccggtctaatttttaagtaataatgtttctctgatataagctcccatatttggctaagtataagactaaatttttttaaagttatctcaaatagattcgaccattttatttcaccccaaaatggcatgtaaaatcctcacaatttacagtttaatagaaaaatatatgtactgtacagattatatctagaaaagcgattatcagtgcctcagtttcatctgtaaaatagagatgctaaaagcacatagcacacagagttatggaaagaattacgttacctatgtaaagtgctttgaagagtgcctgtcacat

SEQ ID NO: 5675 - DNA, 564 bp, Homo sapiens
aaatgatatgttttcttaccctctggactcccactccttcaccccacgtctggttggttttcagtttcccccaggctcttaagaaaggctgcacgggtgaaaacgaggacagtggttctgacccccacatacagtggagaagcagatgcgctcctgccttctctgagaacagaagtgtggacctgggggaaagggaaggaagggcagctggggcacggcgatgttctgcctaggtaagcgctaccaacatttaccgatagaagttggcttaaacaaataatctctctcctgggaaggtctctaaatctcactttcctcatagaggaaatctgggctcttctagcttcagattattacacaccattaactctgataaaaagctgtcactttactcttgaatttgttcttaacagtaaaggacttggccaggcctggtggctcacacctttaatcctagtgctttggaagactgaggcaggtggatcacctgaggtcaggagtttgagaccaggctggccaacatggcaaaacccagtctctactaaaaatacaaaaattagctgg

SEQ ID NO: 5676 - DNA, 505 bp, Homo sapiens
tctttcttaactccatccctcccagtccttccctcccagtccttccagttcttgggcctcccagaacaggtcggtcttccttctctgctgaagacaggagactgccctcttccctggacagggctgaacaagccccaccccctcttggtcatggccaaggtcactccccacccactgggcctcccgctctgtagtgtggctgtgtgtctctaagagcccagaacagaacagtgttctagtctggcctggccagggtggaaggagggaggaggtggtacagtgatcacctccttcaatataccattgattcctccattaatacagcctgtgcagcaaccagaagctgggggcaaggtgtccctctgtgtctggtacagtgaatcaccttgctctgcagaagcagaggatagctggctgatagaaagcacggtgccaggggagcctgagaggccaaagctaagcaggccagggccgggcgcagtggcttatgcctgtaatcccagca

SEQ ID NO: 5677 - DNA, 162 bp, Homo sapiens
atttggtggtttaataattagaaagtaaattactaaattaataaaagaaactatcttggctggttatatgggcttttgccagtaatcccaacccttttttttttttttgaaaaggaatttttcttttgcacccaaggtggagggcaagggaaaaattttggg

SEQ ID NO: 5678 - DNA, 584 bp, Homo sapiens
gaactcctaacctcaagtgatccgccctccttggcttcccaaaatgccagcattacaggcatgagccaccgcacgcagcctcaaaagtgtgattttttaaagagcaaataaaatacatcaaaattaacttatatctgaaaaaaagaaacttaatagaccagtactttgatatgtgattcaactagagctttcataaaaaactttaggctccctaaaacggctctttattggattagtacaattggctgaatttttgtttaagggtaaaatttgcccaagaatgtagggctttaaaatttatttgccggcggggtgtggaggctcacgcctataatcccaacactttgggaggccgaggtgggcggatcacgaggtcaggagatcgagagcatcctggctatggtgaaaccccgtctctactaaaaatacaaaaaattggccgggcgcggtggtgggcgcctgtagtcccagctactccggacgctgaggcaggagaatgacgtgaacccgggaggcggagcttgcagtgagctgagatctcaccactgtactccagcctgggcgacagagcgagactccgtctc

SEQ ID NO: 5679 - DNA, 572 bp, Homo sapiens
agatgacttctggtaagtagattctagcacttcttgacactttagtggaaaagcttttggaataattatttattattattcatttacatttttagagacaacctcactctattgcacaggatggagtgcagtgatactgtcatagctcactgtagtcacgaactcctggattcaagtgatcctcctgcctcagccttctgagtaactaaaactacgggcatgcaccaccatgcctgactaattttgtaattttttgtagagatgaggtctcactatgttgcccaggctggtctcaaactcctggcctcaagctatcctcccgctgtgtcttcccaatgtgctgggattacaggtgtgagaaaccaggctcgccctggagtaattttattagcatttctcacctgcctatttttgtatgtagataaaagttgcatatatgttgttttgaaagaaaaccagataaaatttaaggatgaacatggctttaaaagtccagggatactataggacttttaacaaaaaaattgactgcccttggttcagtgtttcccactcactccctattccctgga

SEQ ID NO: 5680 - DNA, 598 bp, Homo sapiens
ggcctccttctttagtctgagcttgccttctgcttagaaagggccattctcagttctggcagggagttttcccaacattgagaaggtggcattcttactccccactgcagcctgcacctctgaccggtggtcagcagacaggacagaggtcctcattagacagagttcagcagggtctctgaccaaagtgcatcttcagagtctgcacctacccactgtgaccacgggcaggctctgagtcctaaagcaggaggaactgtgcgaccatcctgattggaaatttgtgaggatcaccgtgttactcaagtaaggtctttggaaagtgtcgtattactactgtttctgaactgcttgttggtggcctggctgagccacacactttatgaaaaccaggacccctcagctggtgtgggtgtctatgcagcctgagaccctcatgtgaacagcctcgtggcagctgtctttgccccttgccaccatcagtgcctccttgttcctgggcactgctttctctgatggtgctccattgttttcctgcacctcagtgtctacagctggatgtctcttccgcaatctaggtgagggggcatcaatggca

SEQ ID NO: 5681 - DNA, 529 bp, Homo sapiens
gaacatcacacaccggggactgttgtggcgtggggggagcggggagggatagcgttaggagatatacctaatgctaaatgacgagttaatgggtgcagcacaccaacatggcacatgtatacatatgtaacaaacctgcacgttgtgcacatgtaccctaaaacttaaagtataataataataaaatttaaaaaaagaataactttccattttatcaattgaaattaatagaagtaaaagtttaaatagtgttgactacaaatattagtatatagatgtatgtatttgatgtaaaaacatagttttggagattattctcttcaaatgatttagtatatttcagaaagataagaggatgataaatttcaaccaaaaataataacactgagcttttaaaagtatacttgaaaaaaaagtacagttgcatagatttgaagaggaaatatagagcagtatgttatctaaaaagttcagaaaatgggtcgggtgtggtggctcacgcctgtaattccagcactttgggaggctg

SEQ ID NO: 5682 - DNA, 547 bp, Homo sapiens
tggagcccagctgaccctgcacggccacatctgtgcctctgtggacctagcatatgcgttccaagctgtcagctctgtggctttttagcctcatttagatagaaaggattaggggggaagaatataagtgatgatgcccttccccgaagacagctcatcctgggaccagctgcctcgggcatcactccggtggtgccgcctgcagatttgcatgtgctcttcctgtgaaagagagacgggggtgacaaggggaagtggtaaattgctgatgattggtgaattgagtttttctctctggcgggatacagagcatgttgaagaagccctgaacctgtcagaaatgctggattttaatcttgtaggacctcaggcaagccaccaaaccacttcaggcccccatctgatgggggacagtactcatctcatagcagtacccagagggctaagtaacagtgtctgcagcaataccaagcacatagtagggacttcatgtacacgagttgactctaaaacataggcacggtagctcatgcctgtaatctcagca

SEQ ID NO: 5683 - DNA, 615 bp, Homo sapiens
ttgggttagagagcttttggcaacacaaaccatgctacttctgagtctctgaatgttgggattggaagtgtatggaaaacttgagtaagttcctggctctgccactaaatagatgagtgaacttgaacaacttatttaaactctctgagctcctgtttacttatctgtaaaatgaagatatttagagttaaaaacctaggatatttagacttaaatttagacttaaattggctgctgctttggtttcttgaaagaaatactttggtccttggcctccaaagcctctgcttagctgctttaccgattctatgtggtatgtcctcctttttaggttctttgttgctgttttaagagaaaatttccaactaaatgcttgtttctttacagataaaaataaaccgtatgttgactaagatcccacttggccaggcgcagtggctcatgcctgtactcccagcactttgggaggccgaggcagatgaatcacctgaggtcaggagttcgagaccggcctggccaacatggtgaaaccccatctctactaaaaatacaagaattagccaggtgtggtggctgacgcctataaccccagctacttgggaggctgaggcagga

SEQ ID NO: 5684 - DNA, 467 bp, Homo sapiens
gtggaggcctacttttcctgacacgttctttatacccctgggcctgtgggctcttccttacgactaaaatccctggacacctctcttctggagaactgacactcatctttcaagacctagctcactcccccactctctgtaggcctatgcagaggactagcttggatgaagccggtacccagcctcccggcacacatgcacagtgctgctgttttccttccacacctccctccttgcggtacaggacctgcttggttctgcctgcccaggagactctgagctcctttaggacatcttactcatctctctttctctcatgtgttgtacgaacacttgctccatattcagccaggcttcgtgtgtcttgacagagctaaagaccaatgggcaggatgaggtgcagtggctcatgcctgtatgtaatccctgtactttgggagactgagaagggaggattctcttgagcc

SEQ ID NO: 5685 - DNA, 85 bp, Homo sapiens
gaaagcaacgtggcacttctgtgggccccactctggtgactccacagagccgtgtagccctaagggcagagacaggctggaaatg

SEQ ID NO: 5686 - DNA, 533 bp, Homo sapiens
gaaggaggggagagagatggacaaaaggcatgagagagaggaaaacagacacacatggatgcaaagaacctgaaagagacagagatggagagagatcaggcaggctggggtagggaaggggcactagccctctttgggccccgccattccccttgtctgtagagagaatggctgtgctgtaatgcagcagggtgcagactgcattgcagcacggccagactgcaagatcgaagagccccctgtgatctgacgtgattcgccccaggaggggctcaggtgcctgcagtatgaggtcaaaatgaaaaggcctcgaggtcagcactgctccacagaacttcgtgtgtcaatggaaatgttctttatgtgcgctgtccaacacagcagcctttggccatgtgtggcccctggccactggaggtgtagctaacgggactgaggaactgtgttattaatttgatgagtaaattaaatccatctgtgggctgccatgcgtggctgctggtggctgtgccgggcggcaccatttaaggcac

SEQ ID NO: 5687 - DNA, 582 bp, Homo sapiens
gaactttttaaagttactgacgacttggtctcacattcagagattctggttcaatgggtctgggcgggtctgggcattagtatttcttaagagcccgccaggtggttctaatgtgcagctgggttgaaatccgaactttgtagttcttgggacttctttacaacctaaccgagtggccagtcttccggaaccagaggagcgcgtcactccgcagattctcccaagtggatcaacttgggatcacttcagctcctgcatagatgacaagactatgaaagtagaaactaggccttgcgcggtggctcacgcctgtaatcccagcactttgggaggctgaagtgggcggatcacctgaggtcaggagttcgagaccagcctggccaacatggtgaaaccccatctctactaaaaacaaaaattagccgggcgtagtggcgggtgcctgtaattccagctacttgggaggctgaggcaggagaattgcttgaacccaggaggcagaagttgcagtgagccaagattgcactactgcactccagcctgggcaacacagaaagactccatctcaaaaaaaaaaaaaaa

SEQ ID NO: 5688 - DNA, 607 bp, Homo sapiens
cacttttatgggtgacagtttttagcataacctttgataaaatacactcaagtgacttggacttagatgcttatccctacgtccttggtaccttttttgtattaacaaacactgcaatttatagattacatttgtaggaagttatgcttttttctggtttttgttttactttcaacctaggttataagactgttattctatagctccaacttaaggtgcctttttaattccctacagttttatgggtgttatcagtgctggagaatcatgtagttaatcccattgctcttacaagtgtcagcttacttgtatcagcctccctacgcaaggacctatgcactggagccgtaggaggctcttcagttgggccccaaggataaggctactgatttgatactaaatgaatcagcagtggatgtagggatagctgattttaaaacactcggctgggcacagtggctcacacctgtaatcccagcactttgggaggctgaggcaggcagatcatgatgtcaggagtttgagaccagcctggccaatatggtgaaaccctgtctctacaaaaaatacaaaaattagctgggcatggtggtgcgtgcctgaagtc

SEQ ID NO: 5689 - DNA, 566 bp, Homo sapiens
gggaatcacttgaatccagaaggcagaggttgcagtgaactgagattgcactactgcactccagcctgggcaacagagtgagactccatctcaaaaataaataaataaaaggaatttggcataaaatcactaatgttgactgtttcagcctgggtgacagagcgagactctgtctcaaaaacaaaacaaacaaacaaacaaacctgagctccatgtctgtttcacctgttcccctctaagtataaatttcctgagccttctaagttccagccaggtgggccggaggtcaccgagatctctcctcactgggggacggaataggcctctccctgctttgctgctgttctttggccttgtcccctgcctcctttcctggaccacctacaaggacctagagggaacagtactgggggcaggagctgggaaaggcctgctgtggttcactgctagtaagaaatagagactcactcagagaaatttcctgaaacacagcagactcttggcgcagccctttgagcagatgaaggaggacaagaagaagaacatccctcagctccagctgcatg

SEQ ID NO: 5690 - DNA, 531 bp, Homo sapiens
attctcctgcctcggcctcccgagtagctgggattacagacatgcaccaccatgcctggctaattttgtatttttagtagaggcaggttttctccatgttggtcaggctggtctcaaactcccaacctcaggtgatccgcccgcctcagcctcccaaagtgcggggattacaggcgtgagccaccatgcccagctagaactttattcctttttatgactgaataatataaattccaatctttgaggatctggaaaagggagaagaatcaggaaaaggcaagtgacaatcaaagagataaggagaaaatcaggagcaaggaatgccctgaaagcgaattgatgaaatgtttgagaagaatagggtatccaccacatgtcccagtgctgcataaaggtcatacagaatgagaagaaaataaaaagccaccaatttctagaattgaagggtaaccataggtggaaatggctgtgaggtagagtctactctcaagtgcttgataagaagccaaggaatagttggccgggcgccgt

SEQ ID NO: 5691 - DNA, 471 bp, Homo sapiens
tcctcgagcgtctttgtgatcctaggcctggcctcggagtcctcacgcagccctgtgggtctccctttatagaggggactgaagctcaggcaggggcggggatacgtcacctaagtcacacaccgagcaggtggccaagccagagctcctgggtcacactgccccctcctgcctcctggctcactaccagcactccccggcttgggtcccagggaacgtggaggggagagaggaacctgcaggctcctagagcctcagggttttgttgacactgcgattgccaccaacaccacaaaagccagctcagctcagtcacttctgtgtgtgtccacacctccctcgagcccgtctggtgggccaggcactgttagtgttcagtgttctggggccgggggtgcagctgtggtcaatgtcaaccaaactccccaccctcatggggctcagataggatggtagaggcagacggcaaac

SEQ ID NO: 5692 - DNA, 519 bp, Homo sapiens
ctaccactgtgtaagttgagggttgcagagctggtggccacggggaagagccagtgctatagctgaagtttgagggaactggagacccagggagtaccggtgctgctttctagttggagggttgtggagctggaggcttggtggggagccggtgccgcctcccaagtctgagagtcattgagctggagatccacaggggagctggtgctgctgttgtagtttgaggattgtggagctggagacccggggcggagctggtgctgcagttggagtttgagggtcagggagctggggatctggggagcggccagtacagctgtttaagcctgagggtcgtggagctaaacatggagccaaagttggggaagtagagagagagagttacaggatgaccctggaaatggtagacgtagctgtaccccaagcaagctaagcttgggaactcctcaatgctagtgatgaatgcattctttttcctcttacacagtttggatttgttttctgtgtctcatgagacag

SEQ ID NO: 5693 - DNA, 605 bp, Homo sapiens
atgggtatatacacaaaggaaaggaaatcagtacgttgaagagatatacactctcctatgcttattgcagcactattcacaatagccaagatatgaaaccaaactcagtgtccattaagggatgaatggataaagaaaatgtggtatattagtggttactagaggcgaggaagagtaggggtgggatagagagaggttggttaacagatacaaaagtatagctagataggagaaataagttctagtgtgctactgcactgtagggtgactataattaacaacactttattttatattttcaaatagctagaagacaggattttgaatgtttccaacacaaagaaatgataaatgtttgaggtggtggagaaattaattacactgatttgatcattacacactgtacacatgtattgaaacatcacttgtaccccagaaatatgtatcattattgtgtgtcaatttaaaaagtttatatacagaagaagaaaaaagaatgaattgagcctccactgctgataggagttaaaatcaatccaacctggatggcagtttgctaatacagatgaagattccaacagtgcaattttattcttgggaattta

SEQ ID NO: 5694 - DNA, 424 bp, Homo sapiens
cacgcaggcaccttcccaggggcagggttcccttagatactttggttctcattgaagaggctgactcggaaaatcaatgcagtcaccacgcctcattcaggaccatatacaacgggccctgactgtgttatttttattaccttagccataaattgcattttccccttattttattatcaaatttttcaaaggagctcagtaccggttaaattgacggataatttgtgccctccctactgggttactttataatctagaaaatgctcacctagtctgcttttctcagttgttaaatgagatcagtgtgcctactttatctcagcatcttggaaattatttcagaagggtgcttccagggaggcagtaggcaagattaaaatatcattcaggccgggtggggtggctcacacctgtaatcccagca

SEQ ID NO: 5695 - DNA, 467 bp, Homo sapiens
tgttttgggaaacagtttcagtagagtagtgtataatagggagaatatgagatgaaaaagttctgaagaatgagtgtgatgttggaggtgttatgtgctataagatgctcttggagatagactggaaaagtttggaatttaagataggtggagaggagagaaccagacttagcaataccacaatgagttgggaaaggatgagaaggtggaagatggtgtagaatgaggaaaatggtgggaaggttaattttatgtgacaacttgactgggctaagggatacctaggtagctggttaaacattatttctgcgtatgtgtctctgagactgtttctggaagagattagcatttgaatcagtaaatttagtaaagaatatctacccttgggccgggcgcggtggctcacgcctgtaatctcagacctttgggaggccgaggcaggcggatcacgaggtcaggagatcgag

SEQ ID NO: 5696 - DNA, 437 bp, Homo sapiens
  misc_feature 7, 8: n = A,T,C or G
tccggcnngtgactctgttttctgtggtagtggtagtggggagtgctccaagaactccttgagcctcattagtccctcgttcttatctgagaaggttcctattgcttggtgtattagtccgttttcatgctgctataaagatactacctgaattgggtaatttataaagaaaggaggtttgggccaggcatggtggctcatgcctgtaacccagcactttgggaggctgaggtgggtggatcacctgcagtcaggattttgagaccagcctggccaacatggtgaaaccccgtctctactaaaaatacaaaaattagccgggcatggtggcacgtgcctgtagtcccagctatttgggaggctgagacaggagaatcgcttgaacccgggaggcggaggttgcagtgagccaagatcgtgccactgcactctactct

SEQ ID NO: 5697 - DNA, 128 bp, Homo sapiens
tatgtgctaggtcggctcttaagaaatatactttaagcctaacggcctcaaaaaaaaattgtattatcaaacatagagtgtgaaaataacactgaaataattttaaactaaaaggctaggccgggtgc

SEQ ID NO: 5698 - DNA, 548 bp, Homo sapiens
agtaggctgtcatggcccctcacagtcaacattctccccaaatatatatatttgcacatatatatctatgtaacccatatatatatatatatatatccatgtagccatatatatgcacaaaatgaatatatatatttatgtaatccatatatgtatatttatgtaatccatatatatccatgtaattattgatgtattactgttaagcatctcagtaggctgtcatggcccctcacagtcaacattctccccaaatatatatatctgcacatatatatttatgtaatccatatatatatccatgtagccatatatatgtatgcaccaaatttgtaaaattattgagctatacatttacatatgtattttacaccttaatacaaatttaaaaatttgagtcagtggaaattactggaggaactgggaaagcagtcttttcattcctcttgtattttgtgtttttgtgcatatgtgccataataaaatcactgagctctagttgaaaagaactggatttaaaacatagctaagtttactagcagtgagag

SEQ ID NO: 5699 - DNA, 111 bp, Homo sapiens
gccgaactggaaatgtgcttaagctgaaagttaactttcttcctgagattatcacactatccaaagaagtccggaacctcaaatggcttggtttccgcgtcctactggcga

SEQ ID NO: 5700 - DNA, 463 bp, Homo sapiens
actttataaaaaccaatatttccccaatgtaattgctctcagactatgtttaactctgaggaatgcacttgtggatgcctgctttagaaagatgaggaggtaggccgggcgcagtggctcacacctctaatcccagcactctgggaggccgagacaggtggatcacctgaggtcaggagttcaagaacatcctggccaacatggtgaaaccccgtctctactaaaaatacaaaaattagctgggcatagtgacaggcgcctgtaattctggctactcgggaggttgaggcaggagaattgcttgaactcgggaggtggaggttgcggtgagccgagatcataccattgcactccatcctgagcgacagagtgagactctgtctcaaaaaaaaagaaaggaagaaagaaagagagagagagagaaaataaaagaaagaaagacaggcagacagacagaaagaaa

SEQ ID NO: 5701 - DNA, 554 bp, Homo sapiens
acaggaaaactatgacctgaattctttgaatcggccaccttatctgcctggttttgaaacggaaacatctttgatctggagtctgggtttgaatgctatgggtgttaaacataaaaaactgaagtccaaggacagcaagggttatcgtaatatctaggtaggtgggacaggcttaattgctttgtattcgtccataaaaattcctttcctgcttgagagggcattgctggtaaattattctgtctcttcctcacttattctcacattccagtttatttcctaagtcataaaaataatacattaaatcctcacataaaccccaaaaggtagatattatttttgtccccattttagagataaaaaattgaaaacaaggccaggtatggtggctcgtgcccgtaatccagcactttgggagtctgaggcagttggatcacttgagatcaggagtttgagaccagcttggccaacatggtgaaacccaatctctactgaaaaaaaaatacaaaaattagctaggtatggtggcaggtgcctgtaattccagctagtcg

SEQ ID NO: 5702 - DNA, 575 bp, Homo sapiens
gggggggtataattcagtccacagcatagggtctgtttcccagtctcagcctttggggcagtatcttcaatttccaatcacatgatgtgaattgacaaccaagaccacaagttatgacttaaactccacaaagtttccctcttacattccattactagaaacaaggaagcattttaaaaactattaccctagtttttttgcagtcctcttaaaatacttcaccagatagtagatagcagcattcttttgtattttgaagtttctgcagcatggtcttttaaagaaaaagagcttcaggccaggcgcagtggctcatgcctgtaatcccagcactttgggagaccaaggcgggcagatcacctgaggtcaggagttcgagaccagcctggccaatatggtgaaaccccatctctactgaaaatacaaaaaaaaattagcaggtgggccaggtgcggtggctcactcctgtaatcccagcactttaggaggctaaggcaggcagatcatgaggtcaggagtttgagaccagcctggccatcatagtgaaactccatctctactaaaaatacaaaaaa

SEQ ID NO: 5703 - DNA, 594 bp, Homo sapiens
gggcatggtggcttacgcctgcaatcccagcactttgggaggccaaggaaggcagatcacttgaggtcaggagttctagaccagcctggacaacatggtgaaaccccatctctactaaaagaaaaaaaatatataaaaattacctgggcatggtggcatgcacctgtaatcccagctacttgggaggctgaggcaggagaatcacttgaatccaggaggtggatgttgcagtgagccgagattgtgacactgcacttcagcctgggcaacagagtgagactccttctcaaaaaagaaaataaaaattaaaaataaacaagaaaatgatccctgatatttaacgttgaatagaaagagggaccctttatttcaactacctttatacaagctcattcaaaatggataatttttaaaggaaccagcagcctcaaaaacattatgctggccaggcgcggtggctcacgcctgtaatcccagcactttgggaggtcaaggcgggcggatcacgagatcagaagattgagaatcatcctggctaatacggtgaaaccccgtctctactaaaaaatacaaaaaattagccgggcatggtgg

SEQ ID NO: 5704 - DNA, 611 bp, Homo sapiens
cataaccacttaaatacgcatatacacatgcacaacctgtttactcccaaacattcttgtagtcacatgtaattcatcataacttgggacaatttgtaacttatgaaaggcttgccacctgagccttagctcatgtgattatcaaggattgtctgtctcatcatgtgtactttccaaatgatgagatagataatctaattattactatccagttcttaaaggcaatacgactgaactcagtgcaactgagagactcccaaagacacacagtgagtagttggcagtgtccgatttaaatccaattccaaacaaattcttctccactctgccacatatgtacccatgacatgtaaacacttgtatctcctacgcagcaagttgaagttctttagcttcccaaaagaatgcttggaatcagcccatcaggtgggagtagctatgaatgaagctgagagtcaaatagagagtcacccccctccaccttcaagcagacacacacagctgagactcagttcacccttcttaacccccagtctttatctgggacattctttcctcccaggtcaccatctcccgattcctctcccctaaccaaccccaacccacacact

SEQ ID NO: 5705 - DNA, 566 bp, Homo sapiens
tgtggcccaattcttaacaggccacagaccactttaggtccacagcccaggaacttgggacccctgttatatagcacttaggacaatgcctctgagcagtgcttctaacctacaatgtttcccttctgggggatacatttaaatactgtctaaattcaagtcacttctgaaaaggagattattttgagattaaatttaatccctttttcaagcacataaaatttccataaaatgtaatttagctggtaatgagctgccaatctcactggtctgaaaatcttttgccctttaaatacatagaagctttaagatttatttcacatacgtctttataagagtaaaataaactactatttttaagcagtagtatctttcgcattaagcaatgagtgattcaaaaagaactaatttcaactgattatcccaattagtaaattaaacttgtcaaggatcatgaccaatatgtaaaaaagatgatcacattaaattcttatgggtgaatcaccaacacaacttggctggccttattactgagctccaggtaataaagcagactgcagaccaca

SEQ ID NO: 5706 - DNA, 604 bp, Homo sapiens
cttaagagccataacactcaccgcgaaggtctgcagcttcactcctgagccagcgagaccatgaacccaccagaaggaagaaactccgaacacatctgaacatcagaaggggcagactccagacgcgctaccttaagagctgtaacactcactgcaaaggtctgcagcttcactcttgagccagcgagaccacgaacccaccagaaggaagaaactccgaacacatctgaacatcagaagggacagactccagaagcgccaccttaagggctataacactcaccgtgagggtccgcagcttcattcttgaagtcagtgagaccaagaacccaccaattccggacacactatgaactgagctaaataagtactttacatacattatttcagttaatcttcaaatgaaccagatcggagaagtagaatcctccttaaacagctaacaaagctgagcacagagaaattcaatcatttgttaggaggcacacagatagttctttgttggattccaaagccaatgatattaactacaagttatactttttccctatttcaggaaatgaagagaacctaatgaagtcacactaaaacaatctttgatatt

SEQ ID NO: 5707 - DNA, 463 bp, Homo sapiens
aactgcttaactagagcaagaaggaaaattatccaagccccaaacctgggaaacatcaatgcctacgaaatgaactgaagaggaagaaacaatagaggcacaagaggaaggaccaacagaagtaatggaagatacaagtggaagatgacatggatacacacaatgttctactgagtctatggatgacctgttgagcagatcatccatacttctctaggggttctgaaagacactctcctcttgttgggaagacaaaaagccccactctgctactaggtgcctgagtctaggtgcttctcctccctgtcctttcactcccagctctgtcttctctacctgtccctagaaggttcctgtctttgtcacctcagatattcaagattcagctccaagatgccctctgtcttcgaagcatcagagctttgctgaccctcccgcattagttttccctgcctcatcaatg

SEQ ID NO: 5708 - DNA, 616 bp, Homo sapiens
  misc_feature 454: n = A,T,C or G
aaggtggacactcaactagaggtttacatcaggccacatgttgacacctagtcccaggtggacatcaggccccagctagatacctaggcttccagtgaatttcagaacccaggttgacattcaggcccccagtggtcatctggcctcatgcgaacactcagacccaaggtgcaaatgatgtctcaactggataccaaacccccagtttgatacccaaggcccaggtggacaccaggtccaaggctgacactcaagccctaagtgaataccaaactctaggtgaataattcaacccaggtggtcattaggacccagctggataccagtccccaggttaacacaaggcccccagtgggcacctaggcaccagctggacatcaggccctatgtaaacacccgggtctcaggtgaacaccatgccccaggtggacatcaggccctaggtggatacggngccacaggtggacatctagccgctgggcaacatccagccccaggtggacataaccgtttccatggataaaccattcccaggtggatagcaggcctcaagaggatcgcagtcaccaggtagacatcaggcctcagatagacaccaagttcccagatgtacagc

SEQ ID NO: 5709 - DNA, 581 bp, Homo sapiens
aaaattaattagagaagacatgagatctatcaaaaagctgatcagggtggctcacgcctgtaatcccagcactttgggaggccgaggcaggtagatcacctgaggtcagcagttcgagaccagcctgaccaacaaggtgaaatcctgtctctactaaacacatgaaaaaaaagttagccgggcatggtggcagtttcctgtagtcccagctactccagaggctgagacaggagaattgcttgaacctgggaggcggaggttgcagtgagctgagatcgcgccagtgcactccagcttaggtggcggagtgagacttcgtctcaaaaacaaaacaaacaaaaaaaactgatcacctcaggagagcagcagagagaagagtccagatgggagctggtcagtttcaggagagtgcacagagcaggacctcgtgggactggcctagagctcctcaaactaacgtcagttcagcgggtgcaactagcattttaaaacattaatcacagagttgagtagaaaatatcaaaaggtatcagtattattttgtgaaactttatattcatatatatggggggtgtgtgtct

SEQ ID NO: 5710 - DNA, 151 bp, Homo sapiens
aaaaaataaataaaagaaaataaagtaaaataaaaaataaaaatctctctttccctcaaaggaaggagatctgtcctatgtgaaaggacagtaaagattccatctcacctgggcttgataaaaggccacttctgaaatcttgtacagatgt

SEQ ID NO: 5711 - DNA, 455 bp, Homo sapiens
tatatttatggtgtcacatgaagttttgatattaaattcttgttttcattgctagtacttcatgaccatgatcgtttcccttgctgcggttgcttgggtgggacaacaagtccacaacctgcttctcacctacctgataggtaagtctttgaggaaaaactacaggcacatcctggccagtgaaatttaactgtaacttcgtcagtaaacagctgaatacttcctaagttttagacaccgaaaaggaactgtgggaatatggaaagattattatggtctcatagaaagtgaaaacaatgcaataaccaaggtagaaagtaatgtgcaagaggtaaaaataagcaatgattattttctgaggtggaagaggggatgcgagcagaagtttctggggatacatcccagtggaagtaattgatttcatgttgcttcctcccattactgagtttaataat

SEQ ID NO: 5712 - DNA, 607 bp, Homo sapiens
tccacatagtacagcttagtgccaacagaaattgccttgaccactatatccccccataggggaaaagagcaggaggattcctacagtctttgctgctaaagatccccagtctttaccaacacaaatcccagctgacagagatgcctggagcccatgccttacatcccctggagctggagggggccactctggcaccctgcacccggtacggcttcacatgagcccacacctgggagtgatgtcacttgtcttacacctgcaccaggacctggcacccccatgcaccatgacagtgtcacacaatccccaaaaccagtgcccctgcacattcctcacaacttgcactggacccagaactaccacacagcccacccatcatcacacctcaggtgattatttaagaaccaccacacaccccacccatcatcacacctcaggtatcatcacatctcaggtgaaagtcttccccaccaaagccagtctgtaatatctgaaagatgtaactgctccttcaaatgctcagacaccaatgcaaggctacaaggaacatgaaatgtcagggaaacataacaccactaaaggaatatgataatttccagtaatgatc

SEQ ID NO: 5713 - DNA, 487 bp, Homo sapiens
gtttgtccttgggttttgtttttgctgaatctttccttcatattacctgcttcttggtccctgaaggtagatgtctgcccaagatagagccatctgttttaatttctccccttgccttttcctcttcctattacatttgctggcttacgtatcaaatcaggcttgtgttcctagtctctaaatagaagtgcctcctcaaactactctataaatcattattattaataacaaggataataatgataatactaaatagcactcatgtaaaatcttccattacaaaatgctttcagaaatagtacctctgggctgctggtttatataggaaacacaaaaactgattaaaaaagatgacttttctagccaaaatgtgtttgcttttctgggttaaattcatttgtttgattgaaaattttataaagaaggtgtgtattggagaggtctgggattgtggaaagaagcagagtgctgaacccatcaataactc

SEQ ID NO: 5714 - DNA, 496 bp, Homo sapiens
tttcctgcacatcttatctaaaatataactatccactctttcactgtgtatacttaacatggctttattttgcttataccatttatgaatgtgtgtgtgtgtgcatgtgtgtgcgtgcgtgtcatgtgtgagacagagacagaaagaaagaggtagttaattttctgcttctctgtgtaaacaataagggcagagacttatgccttattcaccatgtttatatgaatatttcattaaggctcacaaaaaacaacatgcactattttgttattctcattttacagaggcgaaaacttaagcatagaaaaattaaggaactgtctaggcgcagtggctcacacctgtaattccagtactttgggaggctgaggcaggcagatcacttgaggtcaggagtttgagatcagcctggccaatatggtgaatttccatctctacaaaaaaatacaaaaattagctgggtgtggtggtgcatgcctgtaatcccagctattca

SEQ ID NO: 5715 - DNA, 520 bp, Homo sapiens
gtggtaagtaagaaacaactgactatcagcaatttcataaggttcttaaccttatagaagaaaatgcagagaaaaggtttggcttccttcaaaggttgtaagtacataaaacctggtgccaagtttccccttgtgggaggaacagtgtttagcaaaatacctcgatatttgccttggtttgaaaggtgaggctccatgaaccagagtgaaacagtcatgtgagaaaagtaacaggaagtgggaaaggaggagtgggtggtgagcaggaaatagggagtagatagggaagaatgggagaggagggcacacaatgtcagcatcaaggcagtaggctgggtgctgctggaagtgaggagttccctaagacaggaatgatggaggaattgcagaaaacagtgatgtccaatattggattttaagttcctcaaacctccggtggcaaatctgctacatcaaccctgcgttgtgattgcactttggtggcacaggcatggggtggtgaggatgtgaggtgacacat

SEQ ID NO: 5716 - DNA, 572 bp, Homo sapiens
ggtgctcagaagctctggcaccaagggaagcaccagggttggatgccgacttcccagaaacttcaagcacctgaaacaaacaaataagaatgcacatcaacaaattagtaaagttagtcctttgaaaagtactaggaactggaatcagaaaacctgaactggaattggaaattctcaaccatatacttttgctaactctatgacttcagataagtcacccagttattctggaactcggttaattcatctaaaaaaactggttattataaagataaaagaactggttatttaaccaagagccatttcccccatctttcttcctgagagagccctgattttactcaggtatcaggcaggcagcaaagtgctcggaaaaggcaggtccagcccaagagctgaaccactattggtctaaacccatcatggcaatcccattcccattttccagtgactggtttgctggtgggcaagtaagccagttctagacaacggagcacgagagtatgctggctggggagcttctcagggatgtttttgcaaatcaaaagagcaatgcatgaaagggaatgacc

SEQ ID NO: 5717 - DNA, 372 bp, Homo sapiens
aatggttctccgctaagggcaattgtgcatcacaagggacatttgacagtatctagacacaaacaactagagcatcagagcccctttgctgtacccacagtcttgtatttacagtctatacttccattctttcaggaggtttactcccagaactggtgatataaagaaggaaagtagcagtatgagcactttgagggctaagcaatgggataatatctttctaagggaacagttaaatcaacttcatttggtcttccatggacatgagtttcaagtggctttctggcctttcttctgttggcctctttgctattatgtgaagacttcatttatactcaatctaattcagctaccatgggccatatcaccagt

SEQ ID NO: 5718 - DNA, 457 bp, Homo sapiens
acacttacatatgtcaagaagtgtacatgtaattatatgtatgtagagaaatatatgtagatatagcaactatctacatataaatatatgtagatatagcaaatatatgtagctatatgacagaagtgaagtgaaatttattgattatatcaataaatatactggacttaattagctttataaaaataaataacatttccccagcactttgggaggccgaggtgggtggatcacctgaggtcaagagttctagaccagcctggccaacatggtgaaactctgtctctactgaaaatacaaaaattagccgggcatggtggtgctcgcctataatcccagctactcaggaggctgagtcaggagaatcgcttgaacctgagaggcagaggttgcagtgagttgagatagcgccactgcactccagcctgggtgacagagtgagactctgccgcaaaaa

SEQ ID NO: 5719 - DNA, 586 bp, Homo sapiens
ggagtttgcactttgcataggaaacagaaaggctatcttgctgtaagaggccaaattgcagaagtgggctttggctaaggaatgtggacacactgcagacatcttgcacagaggccaagtcttgcaatgatgtggtcagacgtggtagaggccagctgtttgctccgttgagagaggcttttgccagtccacaggctctctgagggctatgtttaactgaatccaagtatcaaacctgctgagactcactcatcccccagggtgtttggagttgggttcttacagagcacaatattgaaagtaactggtaagagaagttacagataaagacttagctattttaaaaaaaatgtaacatacagtggtgaagtggaatataaatgtattttccctctttcccctataaactattggaatacaggtaaaaacagtttatgctggctgggcacggtggctcacacctttaatcccagcactttgggaggcagaggcgggcggatcacgaggtcaggagttcgagaccagcctggccaatatggtgaaaccccgtctctactaaaaatacaaaaattagctgggtgtagtg

SEQ ID NO: 5720 - DNA, 618 bp, Homo sapiens
ttgggttagagagcttttggcaacacaaaccatgctacttctgagtctctgaatgttgggattggaagtgtatggaaaacttgagtaagttcctggctctgccactaaatagatgagtgaacttgaacaacttatttaaactctctgagctcctgtttacttatctgtaaaatgaagatatttagagttaaaaacctaggatatttagacttaaatttagacttaaattggctgctgctttggtttcttgaaagaaatactttggtccttggcctccaaagcctctgcttagctgctttaccgattctatgtggtatgtcctcctttttaggttctttgttgctgttttaagagaaaatttccaactaaatgcttgtttctttacagataaaaataaaccgtatgttgactaagatcccacttggccaggcgcagtggctcatgcctgtactcccagcactttgggaggccgaggcagatgaatcacctgaggtcaggagttcgagaccggcctggccaacatggtgaaaccccatctctactaaaaatacaagaattagccaggtgtggtggctgacgcctataaccccagctacttgggaggctgaggcaggagaa

SEQ ID NO: 5721 - DNA, 606 bp, Homo sapiens
aggttgcctcagtctctgtgacacaaatgattcctggtttacatttttggtgaataaaagcagtggtcaaattagtgatggaatttgttgataattacatttgtgaagtgaataatgcagcattagttttctgtggaatggtggggttgggggtaggtagaagatataaagtacaaacacatactgctcataataactatgattaacaggagatgttttggtgttaggcacttttttcattcagttcatttctgttctcctgtcatatattgttgaaaatttatcatttctttagtgggaatgagaatagcaaaggtacagaaaaataaaattgttggtccatgatgtcacagcaaatcactgatgaatgagctagaaaatatttagctcaatttttcatctgctgggtgtttgtaagaatttcaaagcagtgccgggcgtggtggctcacacctgtagtcccagcactttgggtggctgaggcgggtggatcgtgaggtcaggagtttgagaccagcctgaccaacatggtgaaaccccgtctctactgaaaatacaaaaaaattagctgggcatggtggtgcgtgcctgtaatcccagctactc

SEQ ID NO: 5722 - DNA, 607 bp, Homo sapiens
acaagtgccacaaataacatacaacattgtaaatcagcacaatttgtagctgggtgaatggaagaaatagttctattcatcacttcctcattttcccttaatctacaatctccagatgtcactactgaattaacagccaacaattccacaactttacctgggagacactggccctttttcttcctcttcctcatcatcactttcattttctgtaaataaattcagagaagcaggtcacattaagcaattcatacttcacataggaacaaatcactgtccagtcatagcacaaggacataactattctcagtgcaagaataaggattctgacaggaatattctagggtgtcctagattaactttggtgagaattagatgaccctgctttccagacccacaggccaaaatctccctctacgtgtagaccataatgacatattccctgcctgagtcaaagttaaacaaaattttttccccaaaaaaatctccaaaaattggtcaaacaattttctaagagtgttgctgcaatacggacttatatcaccaggtaacatggacattaaatgtttagaggcatctatacatgaaacacgactgatagataaat

SEQ ID NO: 5723 - DNA, 606 bp, Homo sapiens
cacccagccacaagtcttatttctaaagagagactttataagaggatttgcagatatcacatgttctcctccaccctagtttgcagacttgaaggctttcctttggaaaaagcaaagagaaacctgagtgccctcagtttaagaacaagagggaatagtcagtcttgaatctcacctacttcccatgagaatgaaaaatccttttaaggccatgccagggctccttacagtcccaaaacactgccacaagttgggaacagataaagtgctgtgggaggttgttctagccaaggctcttggagttacaaggagcagaaaccctctcagattagcccagacaaagcaaggcttactgcagtgaatcagacacctcaggcacaggtcagaacacatcacgtggccgggacttcttgggactggcaccatcacctgaagtccgccctttagaagaccagcggatgctctgtccatctctcaagagccacatgtctctctcacagggtttccactgctccattctctcatccagctttctcatcttgcatgtgattcagccagctcccagctcagctccacattttaacaaccagcaccggcccggcacgg

SEQ ID NO: 5724 - DNA, 585 bp, Homo sapiens
tttgttcatatccttaataatttgcttagtacaaatgcctcaaatggaatcactgggtcaagggcaataattaatgataaagcttctgatattatttgccatattaggcctggtacaatggttcatgccggtgctttgggagcccaaggtgggtgggtcacttgaggccaggagtttaagaccagcccgggcaccacagcaatacctcatttctataaaaaatgttttaaaaattagctgagcttgacggcatgtatctatggtcccagctactcagaggctgaggtggtaggatcacttgagcccaggagtttgagcacttagtgagctatcattgtgccactgcactccagcctgggtgacagggcaagaccgtgtctcaaaaaaaaattaagtaataattataataatttgccatattgctctccagaaatattataacaatagccttcacaccagcagtggataaagcattaggaaatgatcttcatttgaatgttccaagcacagtaaacaaaaacttatcttgaaagagtagagaggccaggagaggtggcttacgcctgtaatcccagcactttggga

SEQ ID NO: 5725 - DNA, 584 bp, Homo sapiens
gaagtacggagttgcattaaaaattcagaatgtctgaatttaaagcttatactcttaactgtttttgattttcattttgagacagagtctcactttgtcacccaagctagagtgcagtggcatcatcacagctcactgcagccttgaccttctgggctcaagtgatcctcccaccccagcctcacaagtagctgggaccaaagtcccgttccaccagacccaactaattttcttcatttgtttgtagaaacaaggtctcactacattgcccaggctggtcttgaatccctggaatcaagtgatcctcctgacttggcctcccaaagtgctgggattacaggtgtgaaccaccatctctggttcttaacggttacttcacaaaagctggactctaaaggcagagacaacaacgtgagaagtactaacaaggccccaaaaatgaagagaaaaaggagagggagtgtgtgtagcatgctacttcctccatactcccatcattgtctctcaccaacaggttctattgttggtgactctgcattgcattgactgctctttaagagtcaatttcactcttcgttcctctc

SEQ ID NO: 5726 - DNA, 502 bp, Homo sapiens
gtactgttaaatttgatgatatttagtaatttggaccatattaaatcttgcttttgctttcttttgcacttccagtactttaaggtcaagtgaatttctactgagttttcagtagttttcactttaatttcatataattaaagcaacagttatatatttatttatttatttatttattttgagacggagtctcactcagtcacccaggatggagtgcagtagtgcagtcttggcttactgcaacctccgcctcctgggttcaagcagttcttctacctcagccctccaagtagctgggattacaggcatgcaccaccatgcctcgctatttttttattttagtagcgatgggatttcaccatgttggctagcctagtgttgagctccggacctcagatggtccacccaccttggcctctcaaagtggtaggattgcaggtgtgagccaacacacccggccacaaaagttatttatttatgagatggagtctcgctctgtcac

SEQ ID NO: 5727 - DNA, 575 bp, Homo sapiens
tatagttctttctgattttttttgcgtatttctcctttttcctgtattttagatatatgtaggtaagtttcttttcaattataactttgatcttctagtctagaaagtaaccactcttcctcccccttttccttgctcctcactggcagacttccctcaactctttctgttctcagcattgcatgagctgtgtgatgacctagaacttgttcttaaaattctgaaagcaatcacagcttgattaatcaaatagacacctggggagactctgtggtctatgaacacctgtcttagtttatctgtaacacagactgactacttgttttgtcttttttttaaaagacagttttccagaatgcaagggtcagatgtcttccaccttaggagaattgccaggactgagcaaaattccactgatgacctgaacagacagctgacacagacattgcttgttttacctgacttgtctccattgctttactttgtgaaggctttgtcaaggaccattgtggattgctcttagctattttcatgtcagatgcacgtgatgtattttaatagccccctcatgaatt

SEQ ID NO: 5728 - DNA, 630 bp, Homo sapiens
catagtttataaaaagctgaaacttggcttttatttgataggtaaatagaaattgattttgcttttgaggtccagacataaaagagaaaaattgactccagaactcaagagaagatcctggattactctgtcttggtttgggttcccccaggaggagattccgagacaaggactctgaatgcaagtagttttctggaaggtcgtgccaggaaacctgccaagaatgggaaagtgagacagggagaggaggaagccaaataggggatgcattgtcaaataagtcatattatgggcagctggtgttcaatctatggagttgtctaggagacagcacaggttcacacttaggttttattccaaccaggaacaagtcaccaatcacatcagtcctgggttgagggctactttttcacattaactccaagcattctggacataggcctggctggttttgacagccagagaaaactctccatcaaagagatgaaagcgcttgcacttgaagctgtagggttgggtctacctgggaataataaatggcaaggggatatagacagagaacacagtgtctgttacaatgtccaaatataaactgtgctgctttgaccttttgtgcaccagtgacttctc

SEQ ID NO: 5729 - DNA, 573 bp, Homo sapiens
catttttcattcatgtgtaaagttatttagtaagactgttgttaatcttccagagtgatagaattttagaagagaccctggacatctagacattttttatgctactacatatggaattatactttactggtgactcatcccaaatagtgtatttttcagagttaaaagatttgttacggctgggcgcggtggctcacacctgtaatcccagcactttgggaggccgaggtgggcagatcatgaggtcaggagttcaagaccaggctggccaacatggtgaaaccctgtctctacaaaaaatacaaaaattagccaggcttggtggcacaaacctgcaatcccagctattcaggaggctgaggcaggagaatcactcgaaatggggaggtggaggttgcagtgagctgggatcgtgccattgcactccagcctgggcgacagagcgagactccatctcaaaaaacaaacaaacaaaattttgtcacaataaagtgattaaacgccctcttcaaaaacaatagaattgtcagcctgccggcagtggctcatgcctgtactcccagcactttggga

SEQ ID NO: 5730 - DNA, 579 bp, Homo sapiens
tcacctctcatttactcctcaatcactactatttgtttcagcttttattatttccatgagactgctccttgctaagataactcttatttgtcagatttcatggtcactctttggaactatcatttgacttttttgaaggattcacctcagatttgacagttctaaaattaaaatcattatctttcctaaaaaccatttcatcttcccatatttctaatcttggttgatgacacccccagggtacttgtcattcacacgagaaacctggaagactttgactttccttcccttttactcagtcatttctttgctcccttataaataactcccaaatccatgtcccttctccatccctacttccagtgccgccttttgttcaggttcccatttttcccctaccttgtatattttcagaggcttcctaattaatcttgccctcctccatttcagtccattttttcctcattgtgctactatagtggattttctaagctatatctaatcttaatggttctccacttaaaaaatattttctggctggacatgtggctcacacctgtaatcccagcactttggtaa

SEQ ID NO: 5731 - DNA, 523 bp, Homo sapiens
aaagtggagaccccctcctgttttatttcttgaaggaggatgttggcgatatgcagagcaaagctctccacttttcttaatagcttacgtaggtgcgtaaacattgtaaactccctttcatagtgatgcctttgagttgtgtgttagaagtagatttaggctatagctaggtacttttataaaatcagattttaaaaagtggacatagtacatccagtctagtagatcataccatctactgtcatgtaatatggcaaactgtatcattgtcacttcagtagctctgtcaaaagtgctggactggaaggcaagagatccatgttcttaacctgagtctgttactaattacacacatgaccccaggcaagtcacttaaccttttatggtgtcagtttcctcatctgttaaatgaagggattagactagattatttccaggactccttccgaaaaagtacaggagagagttgtataactgaaaggcagaaagtggaataattgaggcttggaattcagggtgactt

SEQ ID NO: 5732 - DNA, 527 bp, Homo sapiens
tcttatcttcatctcatcattcaacctccacagttgcttcagcagagaatgagggagcccagagggttgtacacaagctctaaatgcttcagcctgtacttacacagagctcatagccccatgcagaattggccacgtcgttctaccaaactgttagggggctggaaagtgtgtgaaataacatggctttttgatgaacagaaatgcatttccacaagctgttacaaaagaagggtagtgatacaggtaggtaaaacgtgtcccctacagactgggaccctaaacaatgtttaaaatgttgatatataaaatgtagtcaatcggaggagccaagatggccgaataggaacagctccggtctacagctcccagcgtgagcgacgcagaagacaggtgatttctgcatttccatctgaggtaccgggttcatctcactagggagtgccagacagtgggcgcaggtcagtgggtgcacgcaccgtgcacgagccctgcttgggcgaggcattgcctcactcgggaagcgc

SEQ ID NO: 5733 - DNA, 529 bp, Homo sapiens
actacaatttatccttcaaactggtacacttttgaaagtaaacagggaagctgttactaattatactaccacagcacatttaatccaggactgttccagataaacagggatattaggttttcctagtactatgcctcgaaggtccccagtttccacctctgctcatctctgctagatgtgaccacatgttcttaatgttggccaacttgcacatataactttgggtgcattaatcatggtcctatcatttttgggtgactacagaatgatgtactacaagtgtagattataactatctgcactaacagtatggaggtgacttcatataaataatattttacatgtaggttttgagtatgtttgtatttgaatgtagacctgagtgattcttcagaaattaatacagtaaaacattagaaatttaggacagtgatggtggagtgggtcagttagatgtgaaaaattgtaagaaaacatttcttctagacatggaagaataggcattaagattgacaaattatcttgattc

SEQ ID NO: 5734 - DNA, 619 bp, Homo sapiens
gctgaaggcagggattgtatcttcctgacctttgtatctcccatgatgtatgtcacacagaaatgaggaaggcttcaagggaaaggaaccagtttgactgcagctacaacccaagaagagatggaaagactgtaatcagccgagtagctacactgggaaggtgattaaagagctttcattttaaaaggctcgaggtccagagggtttcatgggtgtcctctgtctgacctttaatgaacaggtggctccagtgtatttaaactattccggaccataaagaagacggaaatttctataactcatatcatgaatccaacacaagcttaatagcaaaagatgacataaagaaattattgacgattctcctgaatgaacatagacacaaatactagcaaattgcatgtagcagtgtgtgaataaaacaattaagacttattctaggactataagggtagatgtgtattataaaaatatgtctacataattcattccattgacagaataaaagaggagaaatacattatagcaatagattgcagaaacatcatttagtataattcagcagctattctgtgtttacatagactatgtaaacatattctcctctgatgggaaacat

SEQ ID NO: 5735 - DNA, 603 bp, Homo sapiens
cattcattcattggtcttctatgctgtacaaggccttctgctggggtgagggggaaactagggagcccggggacctctccaacatattctttgctctgtacacttaatcaagataagaaataaagacagcaagactgcaaaaagtctattatgtagacttgcaaaaagtctacataataatataaattcaagccaagtagaagtgattttgcaagtctgtgtatgattaattggctagtgaaatatatggataaaattagttgtagggattaaagcatctgaagtgatctcttgaggctctggtggcaaagcagaaaggggaatttgaatttgaactaggtttaaaagtgtgagtagtagccctttcttttggcaggggaggtgatcctacccattctccttagagcctgtgcaattggtctcagtgtttctcaacatctaagaatgaagctgcattcttaatgctttagtagctgtgcttcaaaacggcaagtttccttttgagagtgattttctctttgttctagcttgtttcactaggcggataagcgtgggcagtaaactgggaggtgtccctttatcagcacctctcagcttcaccca

SEQ ID NO: 5736 - DNA, 556 bp, Homo sapiens
gagaaattgtctagtaattgcctgttctctcttctgaagttgcaccttctagtctggtctctctgcttcccttgtctgtctttttggttcttctctccattttcatttctgccacccacattttagttttcaggatcgaatgcttctgtttttgtttgtttttcaccttattcctgtttcaaagttgcacatcttcttatatttctctgagaaaattatgattttgcttaacacttgatttctgcttcctgctttttatctgtctcctccaagttccttgtttcagtgtgtttgtcatggtctttgtgtctcatgctagaggctttcctcactatctcatgattattggctgtctgttcatatttaaaagagaagcattcaaatttgattggaagttaaggactgtatggagacaaggtatagaaaatattttcattgttttattagtcagggttctgtaggggaacagaataggagatagatatagataatagagatagagacatagacatatagataaaggggagtttattaagtattaacttacacaatcaca

SEQ ID NO: 5737 - DNA, 89 bp, Homo sapiens
atcgtgcagctccagattcgcaagcaggaggagagcctcaaacgccgcagcttccacatcgagaacaagctaaaggatttacttgcgga

SEQ ID NO: 5738 - DNA, 579 bp, Homo sapiens
gaaggaaaccctgatctccccagtcaaggttgagtgcccattctctatgtcttctagcatccagttctctatgtcctgtagcatccaggcctttttaataacatttctcagctgtcttagaactgtttacttgggtgtgttttctctaaattataaggtttttgaggatgggaatttatatccatgtcttttttgttcatcattatgtccccagcattagcatactgtgctgtgttcattacaggaacaagcagctgggtggtctgatccagtctaattgtcctctgattcttcttccaaatccatacctgttttcttacattgctgaacttgaccagaaagaaaattctaatgctacctgatctccttgtcttattgaaagcgattttgaagtagttattctcaaatattactttactctggaagccttttgaaactgcgaatctgtaccagcttaatttttgtgcattcttaatctccatccaggtggttctctgaattttgttttcatccctgtctctggcacacatctctgtctgtatgcgtctggagggttgcagtattgaggaactaagcact

SEQ ID NO: 5739 - DNA, 482 bp, Homo sapiens
ggtgacttggaaaatgagaaagatttagcaaaattccaccgtatcttttgccaggctagaggcagggtggagcgggctgcaaaaatgggaagaccctttaggtacctcgtgaacatcctattctgccaaacgctatggaagtgtgtctcagacatgtcaatcctatgaacagaagttcttaaggtgtgcgtgatgatttagcccatagtggaaaagataatagagctatttaatatggagcagaaagttttgatatggccttcaaaaattaatctctatgattttttttaaataacaaagtaatttttaaaatagacaccctttgccaggcttgaatcagagcaatgaggtgagggtgtcaattgaacatattatctagtattttttatatctgaaacccacagttgttttaaaatcacaaaataggtaggagtgtcaaggtgaccacagcaatcagaataggcattctatgacaggaactc

SEQ ID NO: 5740 - DNA, 525 bp, Homo sapiens
gctgttataaacatttatgtatgagcccatggatatatgttttaatttcttttggatggattttagggggagatcaagaagttgctgaagttttttttattgttgtttattttatcttttttaaagaaatggaggtctcactgtcttacccaggctggcttcaaactcctgggctcaagagatcctcccacctcagcttctcaggtagctaggattacagccacacaccactgtgcccagctaggaagttgcagaggttttgattactcctggcctttagtcttctgaagataggatgttaattcaatttgctaaaatgaagtcaggatggcagtaggggttttgaggcaaggaataatggtttggtttaatatcctatagggaatgggaaggagagctgaccaagggcagattaaaggaattttaggtgccgtggaagtttgtgctgaaattgaggactgttgaatctataagattttcctaaaagtgctcagctgcctggtagaagaagcagagaagagttta

SEQ ID NO: 5741 - DNA, 429 bp, Homo sapiens
aatgaaaaacaaaacccaagctgaacagaaatcatagagggaagaaaaggttataaatatatggatttgtcagagtgattttaagctattaggaatcagttaaatgttttgggattttgtctgagaatgggctaaaggagaatgtcccttttgccttctgaagtttccctgaaaatcactaataggaggcagataaatagtagaaaaggcataaaggtttctgcaatgtgtgtacactggagcccttagaacgaagacccagacacacgatgcgtgcagaagcttatctaccacatgaagtttacagaaagaatggggtcttggatcacaggaaaaaaaaaaaggttatgtgagaaaacaaccctggctagcaacagtggacttattacataggtgaaacctcactgggagcagtcctcagagagaata

SEQ ID NO: 5742 - DNA, 618 bp, Homo sapiens
gtagaagagcagaaacgtaacaagcagctagaagagaaaaaacgtgccatgcaagagacaaagataaaaggggaaaaggtagaacagaaaatagaagggaaatgggtaaatgaaaagaaagcacaagaagataaacttcagacagctgtcctaaagaaacaggtacagtaaacattttgcaccaaatgtgtgatgcctgtgacttgtgagaaatgtaatgcacatctgatttgggactgaggccacatgcatatagctcacatgcttgatcatttggcaagctgttcattttttcaggccatagcgatacacaagcatgcagcaattgattgatggctgaatattcaatcaaccaaatttactgggacagccagtaaatttggctgtccagaagacagagagaaattaattgctctgtgcttgattgttatgaatacccaaaaaaagaattaatccaaagatgataaatgtggtggtggtgtgttggcttctgattctgcgcttgcatctaaactcgttcttttaattatctttcctctatccataggtctgcatgaggcaagaggcccataactccttacctcactcatgggtttgacgttgaattaaaaaaatgat

SEQ ID NO: 5743 - DNA, 578 bp, Homo sapiens
gagcccacgcagaaaccaagctcacctcagtctgggtgtggggcagtcagggaaggcattctggaaaatgtagctgactcgaaataagcacctattgaaaatagtgtgctgagccctggaacattaaaaatgtgttcctatgtggaaatcagaaatgtatgggtcccagaagagaacttgtgggtcagcctgctttccagagagtgccgaggccccttgaatggtgaacactatgcaagcgttcttgtatggccagtggccagcagggaggagggcagagaatgactgtgcctccgggaagccggcgtcaacttcccgacacgcttcaggatcatctctttgtatagaaccatgggatggatcgctgcaggacctactggaaaaaggaggtcatctccaggactctttccatgggtcctttgtgtcttgcagaacttttttcggcaggtgttgtttacatatggttcagagcttaaagaacaactgtgttccaggccagggcagaaagcacaggcctgtctgggaggggcatcatcactcctgcctgcctgcccaaccgacctgtcggtggactgaat

SEQ ID NO: 5744 - DNA, 602 bp, Homo sapiens
tgcgatccatgaaatttgttggaaatttttaccccattaatgctggggtttcttaacctcagtgctagtgacattttgggctcgtaggtcattgttttttgtgtggggtccttccgtgcctttagcatggttcaggtaggaagtttagcagtgtccctgcctcgaccctctagatgccagtagcagctccttctccttgctcctgcacctgtcatggcaaccagaaatgcccagtgtctcatgcgggacaaaattgccctaagttgagaacctctgctttatacagatagattttaagtatttgtcaccaggaaaagcctccaagaagtgatcagctgaattgtttctgtttttatctttcagatgatggatgcaataaaaggaacaatgacagaaatatacaacgatctttctaaaaacactactggaagcacaatagctgaggtcagagatgacacatgaatttcttatttgctaagagtgttttgtgggctgctttaaaggtggtaccatgaagaagcttctctggaaacccctctggggtcctggcttggtcactaagctggctctactgattgtcattatcgatgggggtatttttt

SEQ ID NO: 5745 - DNA, 598 bp, Homo sapiens
ggacaaagttgtgaagaatgctgcatctcagactgcccatgttattgactttttttaaaatcacctggtaatccctttttcctcatatcaaatgcaaacacagcactttctcagactcacttataagagtgcgtttttatccattcttactcttgcttttccttttattctccctctgcccagctataacaaattggattgtgattttgtccacaattattattcctaaaatgacatttatatttggaattgtattttcattacagagaaacaggttaaaaatcaagtcacaattgaaatagggaaagaataccctgaaagatatagtttagcagtaagtgtatttgtacactgataaactgatcttccgaagagactgtttatgattttggcagtgcctcattttttaggtctttgtctttaaggaacccacgtgtggttggggaaagcacctcaatctctgcagttcatatgtagaaactcttataagccttgtgagaggtctgtgttcccttcctgactgtcctacacctactatcttgaacatcagaaacactgatgttcaagaactttgattaccctcatttatctgggagct

SEQ ID NO: 5746 - DNA, 603 bp, Homo sapiens
gatcacaaggtgtgagccactgcaccaggcctgctattactgttaccattacacatccactgctgcccctattactcccctactttgccctctgggtaggcccgtaaaccagggctccaccttctgactggctgcaggtggtcagattgctcttggctacccaggagccagtgggttcttggttctggagaagctggttgaccacaagggaattgtaggttactggggccggcaccatgggtgccctttggaaggttctgctctgacctatccctggaggccccagccagaagagttgtcacttcccttccggccacccactgtgcaagagacaaatcacatgctagtttcgtgccatcttccagtaagatgtgggaggcactggcctgagtgatcccttttcaagcaaagccccatctcgccgtgctcacaggactactgtcataggaacatggatggtttgttcttccatttttgtggagctcggggatggggggatgtgtctgttgtcagggaggtgccatggtaagttgacagggcctgatgttagtgaaactacactgggatagcagcagccatttaaagtaataatggtaagacaca

SEQ ID NO: 5747 - DNA, 582 bp, Homo sapiens
agctatgttgtggtaaaatttctacatttaacttgaagtggtagaaaaaaactctgattgtgaaaagtatgtattttgtaatccccatagtaagggttagtaaaccatattccacaggccaaatccagcccactgcctgtttttgtaaatacaattttgttggactgtagttacacctcattcattgcatatcatgtatggttgcttttgcactacagcatcagatttgggtgttgcaacacacattgtatggctgacaaagctcatcatatttattgtatctggccctttacagaaaaagtttgccggcccagtgtagtgactcttgcctataatcccagcactttgggaggccgaggcgggtggatcacgaggtcaggagttcaagaacagattggccaaaatggtgaaagtccacctccaccaaaactacaaaaattagccaggcgaggtggcaggcgcctgtaatcccagcttttcaggaggccaaggcaggagaattgcctgaacccaggtggcagaggttgcagtgaggcgagatgtcgccaatgcctgtcctagagcgaccactaaagaaaagaa

SEQ ID NO: 5748 - DNA, 440 bp, Homo sapiens
ggaggtccttgttaatatatagtagaacagaaacagtttttacttatttaaaattcatacctgcttctcctcaaaggttttcagcatcttgatagtcagagggaaacattgtagtaagacagtctctatgtttttctgactgtctcttgtggatatgtcattttaacatcttttaacgttgcatccctcatctgttaaatggacatgattataccaattcccacttcaaagttctcgtgaaaatcaatgtaatagcacttcaaacatgggctgttacacattatggaaaattaacttcttaatttcaaaagttagcttgatttttgtttttcagctaacctaaaacaaatgtaaaatattctctgcatattggaatttttactttttatttatttaggcattatagaatccagaactcaaatataggcagtttgctctgt

SEQ ID NO: 5749 - DNA, 590 bp, Homo sapiens
gggaaggattgtgtgtgcccttttgttttgaaagaaattgagggagagaattcttaacttgcttgggctttaaagggttggttttcccttgtgtcttcagctttcatgtgtggaatttatttgcttacacatactacccctcttcctttgcttttctctttaatactttttattttagcaaaggagagagtcgaagttataaacatctggatccagctccttccctcaaaacttaaaaaaaacactttgagcttcttccagccacttaaaaagccaggctcattcagagctaggcaacataccggaaagtaaatggtcatctagaactattgggttctttttttttccccgagtttttactttaaagaaaggacatttcaggatgtgtttaagagatagagaagggctgggcgcggtggctcatgcctgtaatcgcagcactttcggaggccgaggtgggaggattacttgagtccagcctgaacaagatggcgaaaccctgtctctacaaaaaaattcaaaaattagctgggagcgatgttacgcgcctgtactactctggaggctgcggtgggagaactgcttgagcc

SEQ ID NO: 5750 - DNA, 591 bp, Homo sapiens
gggtggtggttttaactgtattttttattataggctgcagtcaagatagtttgaaagctactgtactgggagatgctaggttccttttagcaaaagtgaagaatggttttaaaaaatacactttgaaacaactgaataaacatttattttgaaatgagatccagctgcattgccgactgttacctgcagtgtgatcctctttttgttttgttctggtttggctcagggcctcactatgtctacacccctccaggtagctcctcttgcccacatgtgtctaactgaggacccacaccacccgctccttgatttggcattccttgtctccaagccaaaggtccttctctggtaaaatggttggccttgggcagtggtccagtgacaggaggtgaaggccgaggcgggatagtggcagtggtggtagagaggaggagaggttggggtggatacttgggcattactctttgctaggtttaacatgttgaattcactcgttctctgcaggctttggtatgtccctttaagtgggtacacggtttgcccacagtattaggaggagctttgggattcccagcactttgggaggctgag

SEQ ID NO: 5751 - DNA, 616 bp, Homo sapiens
tctacatatccaggtctctctttatgtaattttattttgcttaatacaaataataaagattctgtttacttataattttcttctggtttctgatgacaatatggtaaacaattttaattattatggtaattaaattaacaaattaatttggaactgtatggagtttatgcatatttctggctaattctggatctgatccttaaggccaggatttaattttggataaagggattcatttaaatttggtattttttttttcctggcaggtgaataatagaactttgtaaacaaatagaaaagtgcattttaaaagataaaagacatggagacgcaactggaaactctttgttccatgaagcattaggctatgacagtgtacaatgtaactgtttgcagttaaatcaatacacctttagagtagcattggaaactatcttttgtccttaccaggttcctcctaaatattttataggttctagcattactttgcatggttccggtacaggatattaaaacgtaaaaaattagatccaacaatatttgcatctcccctcccttttttttctacaaggtgtcaaataactggtttgactgatttccccagctttcactgacc

SEQ ID NO: 5752 - DNA, 534 bp, Homo sapiens
gagtgcggtcacatacttccagaagagcggaccagggctgctgccagcacctgccactcagagcgcctctgtcgctgggacccttcaggtaggacagctcccaacgctgtggggactctcagcaaaacttctccttcctttccacggctctgcttcttctgacctcatcttagttttgctttttcttttcttccttcgctatttttctacgatcctctaagaaccaagtccttgaaacttttggctcaaagtggatacagagacaactttttctagaaagttcagaaaagtgtattttgaggacggagtctggggaaatcaatgggatggggctaaaatcgtgcctggcagtgaccgggttcttgttctaggatgtggagggagcagggactttgaaacaaactgggataggatcctgtttatggaggaaacaccacacaccttggaaatgacatcgggaactggccagatgtttttcacctcctccgttttgattccgattgcttcaggacttgaactgttactccgctcgct

SEQ ID NO: 5753 - DNA, 488 bp, Homo sapiens
gtaaagagaccctgctgatgtctgatcatgaggagctcactattctgtaggaaagaccataccctagttgggcagctctaatcatttcgaattttcacctgatttccgcctctctgtaatttccagcccttggccatatgttgttttctggaattctaatggataagactatttgctctatgagataacccatcacatatttgaagaccactatttgtcctacctaacttttgtttctaaggctcaccccaacaacccacccccagtttggttcattcagcagaactatctggagcactgtgccctaagcattggggctaccaagatgacaatgataacatcaaggagctcacagtataatggggggagagacagatacatacacaggtaaaataagtgctgtagaagagtgatcaacaaagagctatgaaaccagtaagattctaaaaactgactttgtgctgagcaagaggaggcttttcagaaaa

SEQ ID NO: 5754 - DNA, 563 bp, Homo sapiens
gaaggctggaggacattcagaatttctggagaagggagtagcaagatgatgtatatggtaggaggaagagaaagaaagggagtttagggaaatgtcagatagtccagtgttaccagaaaagaagacgcaggagagaagatagtgggagataagaatagagacacagcttgaaaccaaattacagagggcctgagtgccaagataaggccttcaggctgtgttctgtaggcagtaggatggcatgcccagagctttgtgtgtgcacgtgcgtgcatgtttaatcactattgcacctcagcttaggctggtttagaaagagaaggcactacctaaacgaaaaccaaaccggaattcatatatggtgggtgtccatgaagtttccttatttccctttctacatggaagacttgctgaaggcagggattgtatcttcctgacctttgtatctcccatgatgtatgtcacacagaaatgaggaaggcttcaagggaaaggaaccagtttgactgcagctacaacccaagaagagatggaaagactgtaatcagccgagtagctacact

SEQ ID NO: 5755 - DNA, 590 bp, Homo sapiens
gggttctgtatagctcactgtaaccttgacctcatgagcttgagctcaagaccctgggttcaagtgatcctccccactcagcctcccgagtagctggaacatcaggtgcttgctaccacacttagctaatgtttaaattttttgtagagacaggatctcactctgttgcccagactggtcttgaactcctgggctcaagcgatcctcctgccttggcctcccaaagtgctaggattacaggcataagccactgtgcccagcctgtttttgggttttctaggtacacaaattattaagagttcagcaaattttctgtatactaaggtcaatatacaaaaatcagttgcgtttctgttagcaggaattaactattaaaatatagaattttaaaaaaaagatactaaggcaattagaaagtcagttcaataggaaaatggacaaaagacatgaaacaagataagacataaaagagaaagaatagagatttaaaactgatttaattgaaacaactgatgagtactgaaaaagtaaactcagtgtgatttaacactgagtttaaatttaagaaataaatgtggctgggcgccatg

SEQ ID NO: 5756 - DNA, 553 bp, Homo sapiens
caggtgatgaaaaggatccactccttgatggaaaaatactcagaacttttacaagaagatgatcggcaactcatagccagatgccttaagtatttaggatttgatgagttggcaagttctttacatccagcccaggatgcagaaaatgatgtaaaagtgaagaaaaggaataaatattcagttggcattgggccagctcggttccaactgcaatacatgggccattatttgatacgagatgagagaaaagacccagatcccagggtccaggattttattcccgacacatggcagcgagagctccttgatgttgtggataagaatgagtcagcagtgattgttgccccaacgtcctcaggcaaaacctatgcctcctactactgtatggagaaagtgctgaaggagagcgacgacggggtggtcgtgtacgttgcacccacaaaggcccttgttaatcaagtggcagcaactgttcagaatcgttttacgaaaaatctgccaagtggtgaagttctctgtggtgttttcaccagggagtatcgtcatgatgcct

SEQ ID NO: 5757 - DNA, 579 bp, Homo sapiens
ggattaaaaagatggtagtgatctcacaatccagccccaggtgcttctcagaagcagaggcgagggccggctggggacactgcagtagtgggctggatgttgcttacttcactgttctcagccaagggcccagcagtggctcctctggggtctccttaaaaggtggctcgctgcccctggcttgccccaggctatgggtcggacgttcctggagtaaagcctgactttatgtattttatgaaacacaaataattttcatgagcactggtggttaacatcaactctttggagctttttgtgtttgtttatttaaaatggaagctgtctctcattttcatccaaagagatttcttccctggggcggtcaacaagtcttggcaagtgctagatccctggtttagtttttgccatagcttggctattactgcaaagaaaagtcctctcactaagccctgtgagtttgcatgcatgcctgtgtgcttctgtgagtgctgtggaccctgtgtgttccaataatggatcctggggctcagtaaacacagtggctaaaaggacatctatgctgatgaaatcgtctct

SEQ ID NO: 5758 - DNA, 600 bp, Homo sapiens
ggcccactgtgtcattcacaaagtgcatccaaacccatcatcccaggtgaccctcacaataaccccgtgagatttgcaggccaggagcctcctcaaaggaggagtcaggaatgttggggttaacaactcctccaagtcaggaccaggaaatgctatctccagcaccaacctaggttccctatgcttcctcccacaccacagcttatgggcgactgccacctcatggacagagcccttccctgtccaatttccaccaggctccttcctctgatcatcccctcagacaccttgttttctgaggccagtcactctgggaactgttgtccttggcaagtggggacctgggactttgcagaaagcagatgctaaggtcatacttggctgggaccagcattggacagcaaacctcaccttttatttttaaattttatttatgtacttatttgagacacagtctcattcttacccaggctggagtacagtagtgtgatcatggcttgcttcaacttccgcctccccagctcaggtgatcctcccatctcagcctccctagtagctgggactataggcttgtactgccatgcccagctaatttttgta

SEQ ID NO: 5759 - DNA, 431 bp, Homo sapiens
gctcgtgatactcctgctcgctggcttcatacttcccgcgttacttccaggggttaccagcgtttccatccagtcatttcacacacctcattgaacaattttccaagtgttggtttgctctcttccttactacatattaatgaggtgtccaagactgctgttcagcacgtatctaaaatgttgtttaactacatcagaaggtaaatctatagctgctgaagcgaactaaaaagctgtgtcaatctggtgcagtggctcacacctgtaatcccagtgctttgggaggctgaggtgggaggatagtttgaggctaggagtttgagaccagcatgggcaacatggaaagaccccccccccatctctaccaaaaataaataaataaataaaattagctgagtgtagtgccgtgcacctttagtaccagctactcg

SEQ ID NO: 5760 - DNA, 581 bp, Homo sapiens
ggcaagttaagcagcactggaccctttgccaggcattttgaaagaattacaggatttggtcatgtgatattaaatctaatcaaagtagtgttctaggaggcccatcattatgataaaaatgacttgctacttcaaatagggacactagaggaagctgtttttagaggactcagttgtagtaggaaatccgtttggtttaagacaatgcttgaactgaagacactgaataaataatgacttccatgcttattaacaacactaggattaactttgtacctttagtcaggaaggactattggatatattaatcactatgggatattatgtctttaatgttgagttgcaggaattcataaagaaacaagctcaacgtcgggcgcagtggctcacacttgtaaaatcccagcacttaggtaggctgaggagtgtggatcacctgaggtcaggagttcaagacaagcctggtcaatatggcgaaaccccgtctctactaaaaatacaaaattagccaggcatggtggcaggtgcttgtaatcccagctactcgggaggctaaggcaggagaattgcttgaacctgtg

SEQ ID NO: 5761 - DNA, 583 bp, Homo sapiens
gattcagaaccctgagtacaagggtgagtggaagccccggcagatcgacaacccagattacaagggcacttggatccacccagaaagtgacaaccccgagtattctcccgatcccgtctctactaaaaataagaacattagccaggtgtggtggcacatacctgtagtcccagctcctctggaggctgaggcaggagaatcacttaaacccaggaggcggagattgcagtgagccgagaccacggcattggactccaggctgggcaacagagcacgactccatctcaaaaacaaacaaaaaaaaagagtgtcacctggggctacttggccagacacagagagcaaggagacatccctattatctgtcaaaaataattgttggggctgagcacagtggctcatgcctgtaatctcagcactttgggaggtcggggcaggaggacttgaggcctagagtttgagaccagcctgggcaacatagcgagcaccccatctccagaaaaaatttaaaaattggctgggcgcagtggctcatgcctgtaatcccagcactttgggaggccgagggggatggatcatttga

SEQ ID NO: 5762 - DNA, 406 bp, Homo sapiens
tgaacattatgcaagcgttcttgtatggccagtggccagcagggaggagggcagagaatgactgtgcctccgggaagccggcgtcaacttcccgacacgcttcaggatcatctctttgtatagaaccatgggatggatcgctgcaggacctactggaaaaaggaggtcatctccaggactctttccatgggtcctttgtgtcttgcagaacttttttcggcaggtgttgtttacatatggttcagagcttaaagaacagctgtgttccaggccagggcagaaagcacaggcctgtctgggaggggcatcatcactcctgcctgcctgcccaaccgacctgtcggtggactgaatgggccaagtgttcagaagtccttgggaagaggatagtgtcctgaatcataat

SEQ ID NO: 5763 - DNA, 585 bp, Homo sapiens
ggacttaaactttataatttttggttatcatgaataatgctgttataaacatttatgtatgagcccatggatatatgttttaatttcttttggatggattttagggggagatcaagaagttgctgaagtttttttttattgttgtttattttatcttttttaaagaaatggaggtctcactgtcttacccaggctggcttcaaactcctgggctcaagagatcctcccacctcagcttctcaggtagctaggattacagccacacaccactgtgcccagctaggaagttgcagaggttttgattactcctggcctttagttttctgaagataggatgttaattcaatttgctaaaatgaagtcaggatggcagtaggggttttgaggcaaggaataatggtttggtttaatatcctatagggaatgggaaggagagctgaccaagggcagattaaaggaattttaggtgccgtggaagtttgtgctgaaattgaggactgttgaatctataagattttcctaaaagtgctcagctgcctggtagaagaagcagagaagagtttagtcagaatgagggagtgagga

SEQ ID NO: 5764 - DNA, 596 bp, Homo sapiens
ccaaatatataatattttctgtcttttctaattaactgcaatctttctcattttagtaaatggcaaattccactctttcacttactcaggggaaaaaccttgggattacccttgacttctatcttatacctcactctataagcaaattttaccatttctacctgccaaataaatccagactaccactcccatgtaaatcactgtgttacgttgtgatacccacctaaatagtctccttgccaacaccctccaggtagtaatcaatgtggttctgctcaaaacatttctcaagttttttccatttcactcagtaaaactctttacagggccccacaggatctcactatagactcttcctcttgcctaattacatcccacgttgtcccacaacacatcagacacactatattccccctttggagcctgtgcatatgcagtttttggaatattgtgcccccagataacctcatgactcacctcctttaggtgtcactgtgtcaaagagtcctttaccaccccatataaagtaataatacttcacctttggagctcttcagtccctcacctttgcttgaatttttccataaaatttattc

SEQ ID NO: 5765 - DNA, 544 bp, Homo sapiens
ctcttagatggagcggcaaatgtcagtgaactccagcatcatggggatgcaaggtccaaatctcagcaacccctgtgcttctccccaggtccagccaatgcattcagaagccaaaatggtaagtaacagttataatcaccctttcattattctgtgactttttcttttgaattttactctgactccaaaaccttagttcagctaggtagagggctccatctttgttttggtgaatgaaaggcagtgcagagactgcctctctttttgaggatgtttgttacagagccttggtgtcagataatcatgtaacaagcactggattggcaagtggtattaatgaaaggaacatttaggagttttggtagatccatacaagttggggtaggatatgcccaagcgtgtatatatttgctcagcatgtgaaataataaaaataatacaaaactactcattcttcaaggtagttacagtttcaatgccactcttcctgtccccatattcattaagacagaagcttgatgcttaaacacacactggtatgaaa

SEQ ID NO: 5766 - DNA, 536 bp, Homo sapiens
ggagtccctagtatacccagtatacacagcctggcacaaagaatgctcaataaattatatatcatttgcttcatctctctgtatctagaactcattaaaatctgtgtcatcaatatctccatcatcaatatctacctacataaagcctacctggcttagccccaaatcctcaacctgagcaagaagaagctgatttctgctcctgcctttactacttcttggttttctgacactgagaaggtcatttagcttctccagatttttgttttctcatgtgcaagataaaggagttgaacaaagacagtggttttcaaactggattccgaggaaccctagggttccaagaagacatgatggtgagaagagcaaggcaaaagggaaagaagacaattgttaatgagcaggacccccacttctacccagattgctccttcttgctctgttttgtctaccatgcttccacacaatactacacttaatcaaagggttttggcagggcacagtggctcacatctctaatcccaacgctttgggag

SEQ ID NO: 5767 - DNA, 511 bp, Homo sapiens
tgaataaaagaaggacacaccaggcaatcatcatttgggggaacttcagagaaattgctccatgagagtaacacagagcagtgacttctgctggaggggttcacaggtgacattttgagccctgtgcagcctgtgcctccgagacagtcagcgagggagccctggcggtcgtggggctgccttcgccagcttcagaactgtggtttttcccccattaacacacttcttgttaagctgatgtggttgctttctaaactgaatcttcccttggccagaaagaaagaaaaagcttccctgcgtgaagatgaaggtttattggcaatgtcttctttagtctcttagcaagaacagcaaacagagaactcccttctttctgacttaagttacacatattttttttctcttttttactttcaaagctggcagcctcataagagcagcattcaaatagaccgtgccagggatgcagggcaccatgaatggggcatttcttgtccttctggcccccttt

SEQ ID NO: 5768 - DNA, 460 bp, Homo sapiens
caccaacaagaacatgagtgattgtttcagtattgacctaaactttgactcttggggttgagacagttttctcaatgaactgagtttgaaccctggtggcaaggtgggtgccaggtggtgttgatggtaggacaacccagagctgtgatgactccccaagagcacggcctatgaaacctcatggacttggcatgttgttgatggaacatccaaagcattgcatgagattctcaaccataagggatggtcaaaattagtgtcacataagaaggtacaatcaattttcacagtcacttcacttttaaggaggtagagtcagatgtcctggaaaataagagaaaactaaaagaaaatgaaaatgaaagccaaaatggatctctttgtgaaatatgttcagagcattagagagtagagtaaaatggtaattcacagaactcctcacccatgaaatgaatatttt

SEQ ID NO: 5769 - DNA, 602 bp, Homo sapiens
gacctttattttccaaaacttcaagctttgactttcatgtgatcaaattataccacccactgcctgtctttatttcaagcacctgcaaaccttcctgggtcattcacatccttctttgttcacttcattagctcttggctcattgtcactgtctcttatttctgtcataattcttggtgacatcagtatctatgtagagcaatactagtgaagatgtggtctggtaactgttacctgtatgaattaagataaggagttatgccagaatataagtcacctgtgtcactaagtttactgtttagcttactttttttgtagcaagattttgatgaaggacgcaatatgttgatttacagtctggtacaaattttgatgtagaagatgcttccaatatcctggtctcttagttccttgatttcttctccagtgatcttattttctaccctaactcaactacatattcccattgtcatatcctagaatattttgtcttttatctgtaactctgctctcttcccccaatctcatttcaagcatcccactttctaattcctctagtaaatacgtcagttccaacagcccatcaatcccattgggaccta

SEQ ID NO: 5770 - DNA, 603 bp, Homo sapiens
gcagtttgaagggtttcgccgagttaatccaggagagtttagacaatgagaagagcagagggccgagaagcaaagccggcggacacgaggcttggggtgaagagaggaagagggtttaagaagagcgacagctgatccagaggagcctcgtgatggagcaccactgagctccggagaggagggagttcaggaaaaggggatcttcagcatccagtgcagtaaatagaccaaataaacaagggtgggcaggtgtttaaccagcactttgggaggctgaggcgggtggatcatctgagatcaggatttcgagaccagcctgggccaacatggtgaaaccctgtactaaaaatacaaaaattagccgggtgtagtggtatgtgcctgtaatcccagctactcaggaggctgaggcaggaggatctcttgaacctgggacgcagagtaagacttcgtctcaaaaaataaaaataaaataaaattttggagcaaaaaatatgaaaagaaacccagtagaactgttaaaataataagttgagaatctagaaagtagagcaaaaacaaagattgagaagtagttagaggctggacgtggtggctcatgcc

SEQ ID NO: 5771 - DNA, 518 bp, Homo sapiens
tcaaactttcatcaacagaaatatggataaacacactgtggtatatccatataattgaatacttaactcaccaataaaaatgaataaactattgatgcgtgtaacaacgtgaatgaatctcaaaataattacatgcagtagtagatactgtatataaatcttagaaaatatgaattgcagtgacagagaacaaagaggtggttttaaacacacagacatttccagggactacagccccctggatcaatgcagataagcagttaaaaagcacactccccagttaatttctggaaggggtttgtctgtatacttctctagccattgtttgaggattgggctcctctctaggctgcatctagtagccaatgggcaaagaaacagcagaaccctgggatactgactgtgagttccagcgtttcctgagttttttcatctggcttgctccagcaataaagctagagcagattatctctgtagattatccttggaaggagtttattcatggattgatcacagct

SEQ ID NO: 5772 - DNA, 565 bp, Homo sapiens
ctaagaaaagggcctataatgaagctgaggttttatataaccgatccttaaacgaatataaagcattaaagaaagatgatgagcagctttgtaaacgaattgaagagctgaaaaaaagtactgaccaatctttggaacctgaacggttggaaagacaaaaaaaaaatatcttggttaaaagagagagtaaaggcctttcaaaatcaagaaaattcagtcaatcaagagatcgaacagtttcagcaagccatagaaaaggacaaagaagaacatggcaaaattaagagagaagaattagatgtgaagcatgcactgagctacaatcagaggcaactgaaagaattgaaagatagtaaaactgatcgactcaaaagatttggccctaatgttccagctcttcttgaagccatagatgatgcttatagacaaggacattttacctataaacctgtaggccctttaggagcttgcattcatcttcgggacccagaacttgctttggctattgaatcttgcttaaaagggcttctgcaggcctattgttgccataatcatgctgatgaaa

SEQ ID NO: 5773 - DNA, 577 bp, Homo sapiens
gatatggagaaatctgctgtatatttgtggcccaactcatgaattcagtgtacatggattatagctctgttaaaacgatcttagaaaagctaggactttctctgtacatagactataacattgtcaacatgcatttgaatagattgtctgtataggccacaacagaaatggacctaaaccataaagtagtaaaccatttttttattaattggtgaaattgtgaagtataagtacctgtgatggagatgatcttgtgttctaatgacatagatgtagattatgttcacatttaagtaagaggaacaactatgttactagcatttactatagaaatgatattgtttttgtgaggatgtgtcagaagttattttacttggggataaaatagactaaataatgcttgcagggtttaccatgatgtctagtatgtgtgacgatggcttcatggttttagagaattcttagaatctttatttttttagtttttgcagtgaatgagaaaagaaaaaaattattgagaaactactaaggctgaggcattgtgctgggtgcttggcaaatgccatcttatttaatc

SEQ ID NO: 5774 - DNA, 627 bp, Homo sapiens
gccaggatggtctcgatttcccaacctcatgatctgcccaccttggcctcccaaagtgataggaccacaggcgcactttttttgtttttgtttttgtttttgttttgagatgcagtcttgctctgttgcccaggctggagtgcagcggtacagtcttggctcactgcaacctctgcctcctgggttcaagccattctcctgcctcagcctcctgagtagctgggactacaggtgtgtgccaccacacctggctaatttttttttagtacagacagggttttgccacattggccaggctggtctcaaactcctgacctcagacgatacactcgcctcggcctcccaaaatgctgggattacaggcatgagccaccttacccagcctaatatagtaatttttattatgcataaaaagttataaagtaaatatgcctcatgggacatcattgtttcatttttatatgaaataaagtaactttctatttttacatggaaatcagaattcatatgtctcacgtgtttttggtgttgttatccacaggagaccaatcattttgcaatggcagtccctaatgatctattccctaatcaactggaaatacttccaaatcagttaataaacttctt

SEQ ID NO: 5775 - DNA, 456 bp, Homo sapiens
ggcggaatgaagcttactctttctactgtgtgacgtatcgcagatgtccttcagtgtttatgttgatctgccttcctcttttcttgcttttatagcgtatttccctttatcttccagtttttagaataatgagttggtactctgacctccaaagatgactaatatgtgttttcaaaaataattatgagctcacggattttaacatatttggtgtgtttcaatccaatgtggccattcatctcaatgctcagtagtctcaattttgttcgttgggaccctcaagtatttttggcatgactcaatagtctcttcctcactttcaggtatgacaggatattccaggctattcttttcttcaaattgaaattaaattgtggattaaatcttaattttattgtgtgctgtgttaagaaaaatttatctcactagatttaattagatgtacctgctgtaccc

SEQ ID NO: 5776 - DNA, 489 bp, Homo sapiens
gtcctggaaaataagagaaaactaaaagaaaatgaaaatgaaagccaaaatggatctctttgtgaaatatgttcagagcattagagagtagagtaaaatggtaattcacagaactcctcacccatgaaatgaatattttgtgagcaggttagtctttttccatctattgagtcagaatctgggtgagtcacacacttcaggtgacagatgccaaaacaccctcaaaattaaccaaagggtgctgcttagccttgcaaagcaaatacaaatattcaaacaaacatctctccaaaaggcacctctccactttccgctaactaaccgtctgtgctatgtctttacctagagccccgtgcttgggatgggaacagacgtgttcctgcgcagccctattattttcttgtcagaagcctgatgagagtgatggagaggtttataatgtgtcctgttttcccctgtaaaaaacacatttctcctaaagccatttaa

SEQ ID NO: 5777 - DNA, 502 bp, Homo sapiens
caattcttgagctaaattacaagaaaacacggtgaatttgtatctgtttcctatatttagggggctggcttaaacgttagtgatacatttggggagtagaaaatggatgttggtgtgaagttcttaagttttggacaaggaaccctgtattttcatttttctctgagccccatgaattatgtagacagtcctgcttcgaagttattatttatacaattcattatagagaaagtccttgggaaccttaactttgagtgaggattgcttgagttagtttttcttaccagccactccatgatactctttgttttttccaggttagatgatcgagttttattatgactgaatctgcacctgcaaaattaattctgattaattaatttaataattaaattctgatgatttctctctgatggtttgggtgtgggctcttaaagagggtttttttttgcaagaggatataacaataatcaggttaattaaaaaaataaggctctcaccc

SEQ ID NO: 5778 - DNA, 510 bp, Homo sapiens
gatcgacagagtggagacccggatcaccgctcgccttcgggatcagcttggcacagccaagaatgccaacgagatgtttaggattttctccaggtttaatgcactgtttgtcaggcctcacatccgtggggccattcgcgaataccagacccagctgatccagcgcgtgaaagatgacattgagtctcttcacgacaagttcaaggtccagtacccacagagtcaggcttgtaagatgagtcacgttcgtgacttgccccctgtgtcagggtctatcatctgggctaaacagatcgacaggcagctgacggcctacatgaagcgggtggaagatgtccttggcaagggctgggagaatcacgtggaggggcagaagctgaagcaggatggagacagcttccgcatgaagctcaacacgcaggagatctttgatgactgggcaaggaaggtgcagcagcgcaacctcggtgtctcggggcgcattttcaccatcgaaagtactcgggttcg

SEQ ID NO: 5779 - DNA, 634 bp, Homo sapiens
ggaattcatatatggtgggtgtccatgaagtttccttatttccctttctacatggaagacttgctgaaggcagggattgtatcttcctgacctttgtatctcccatgatgtatgtcacacagaaatgaggaaggcttcaagggaaaggaaccagtttgactgcagctacaacccaagaagagatggaaagactgtaatcagccgagtagctacactgggaaggtgattaaagagctttcattttaaaaggctcgaggtccagagggtttcatgggtgtcctctgtctgacctttaatgaacaggtggctccagtgtatttaaactattccggaccataaagaagacggaaatttctataactcatatcatgaatccaacacaagcttaatagcaaaagatgacataaagaaattattgacgattctcctgaatgaacatagacacaaatactagcaaattgcatgtagcagtgtgtgaataaaacaattaagacttattctaggactataagggtagatgtgtattataaaaatatgtctacataattcattccattgacagaataaaagaggagaaatacattatagcaatagattgcagaaacatcatttagtataattcagcagctattct

SEQ ID NO: 5780 - DNA, 487 bp, Homo sapiens
cgggtgaactgcttgtttattaattcctacatgtgtttatcaaacccaataaaagctttggtcttaagggatttggaactttggagatcctgaaggtcagtgagtgtcttgtggtccgaatcttcctatagctccccataaggataggctggtcaggccaggcgcagtggctcatgcctgtaatcctagcactttgggaggccgagacgggcggatcacttgaggtcaggagttcaagaccagcctggccaacatggcgaaacccaatttctactaaaaatacaaaaattagccgggcgtggtggtgggtgcctgttatcccagctacttgtgaggctgaggctgaataactgcttgaacccaggaggtggaggttgcagtgagccatgctctcaccattgcactccatcccaaaaaaaaaaaaaaaaaaaaaaaaacccctgggggcctttttttcggtaatcccaaccttaaaaaaacccttggg

SEQ ID NO: 5781 - DNA, 607 bp, Homo sapiens
atcattgcggtgaggataggataagcatcctcaaatggaaattgaaaggcttgacaagacataatcttgaataaaatattatcccacttctacaggggatccaggcctaactagatgcagggcaaagaaaaagtttatctaggcaccgataaaggaaaatcaaaagtccttaaatctgtttgctggcttgtaacccatagcaaaaatctgaaacagatgtaagaaagacccagtgttaacaataacgccatctctttaaaaaagcaattttgctttctagtatttccttcaagaaaaaaataattaccaagtttctgtctatagatcaaaatgcgttaatttgaagtagtaataataatgatgcagaggatgacgaggatgatagatgataactatatgtgagacactattctaagtgttttagatttatttacttatgagaccctcactataatcctatgaggtaagcactattattatataatatggacgtacaaagagcttaaatgattttcttaaggaatatagctagtaaacgtcataatcaggattgtgaatcagtctggctccagaacaagtgatcttaaccactgtgctatacagtata

SEQ ID NO: 5782 - DNA, 593 bp, Homo sapiens
cagatcaagaggtagctggaatagattgtcgagggcattattgcatcatttatcagcaactgtggccccagaagaaaacgcaggtctgcgatcttgacttgctcctttcagtttcatttctcttgataatgtattgaattttgtgctcaactaaaacaacatcacagaacacattctagttttgtttactgagtaaaagcatcagatgcaacacaataggaaacaaatgacagcagagacatttgttaaagacaaggaaggcaattaaattaaagacaaggaaagcacaaggtgggtaggccagtggctcagaaaacagccccactgctagcatgactatggcttgagattaagaagctgaggatatgcagttttcttttaaagaaaaaagtgtattcaatatttccatttaagttgttaagtcattgctgtgaaaatatttcttggatactgggggaaatgaattttagctacccgaagaataaaagccatcgactagtttcatcgaagtcactaccactcaatctatctttactcactcaccgccaaagagtgagttggcatttgtggaaacttccagtgtgtgattattt

SEQ ID NO: 5783 - DNA, 567 bp, Homo sapiens
agaaagaagtcattgtagcagatgaaactcttcaggaaactgctggatagagagggtggccacaaaacctgttttacacctgttgcctacaattatcataagcatcattttttattctcagagtccattttgacagcaaattatatggtcacactgtggatagagaaacccaagactttagagcaggagtcatttaaaggagtaatggtagtgtgtgactgtgtacatagttcaaagtcattcttagtttgtataaaccagaaaatgaagctgagaccatattgctgggaagaacaaagctcactacattatcttgtgactaccaaagaaaaagagctaagattccattagcttgaatccacataaagcttaaagccaaattcgggctaattaaagtcaggctctgggaaaacaaaagcataaaagcagtaatcatgtctgagtaagatgaagtaacctgtgggtatgaagaaaacaaagaccaacaacagccagaaggaaggcagaaaaagcactttgggaggataggagtagatacaggcatcatatcaagttgcctggatgagt

SEQ ID NO: 5784 - DNA, 498 bp, Homo sapiens
agaggactaaatataatgggaagaagtgaagaagaggccagctgctggtctggaggatggcatagggggctgcagcctggcattttatttggtttccccctagactggcagcattcatgcccaaagcactagatattgtccatttataagttcagatgaaaattgagttgttcttggtggaaatgttttagtgactggtatcaagggttatgaaatcctgttttcagctcttcatgtccaatctaaactggaacattcaaaaacatgcttagcacacttacagaacttgttgggaacactcaggaaactcagctacaggcagagcacatggtcactgtggtagaacttgcagtgagacctcaattatctagaacctggccaaccacatacttgacctcactagatgtctttgtggcaccaaatgaaaagaacaggctaatgttggaaatggagtttaaataaacaacaacagttttaaaaatctttgaaaatgccagg

SEQ ID NO: 5785 - DNA, 566 bp, Homo sapiens
catcctgttacgagtgaaggcatggagacatgaaaattacatgtcatctttagggactagcagaggctacggtgtcgccgaagcatgcggatgaggttggaaaggcactcttagcacttgatcctcaccttcccctggggctgggaattagaagggaggagtgatctccttaagtgtggatcatctttacagatgtgaagagccattacccacccctccccaactgtgcaactgtgagtgtgtattgggaagatatgtcagggatatttgtggtatatattagaagtgttgaaggcattgtttttatagaaattattttagtaaattcttttttattattgggcacctcctatgtgatttgaagttgcttaggattttctaaaagattacataaaatactgttgaaaagatgattacatacaaaacataatctgttcattgttaaacgtatacgaaatgttgggatacatctgtgaacaagacaaagtctttgctaattgtgttctatttacgctctagtgtggagagacaaatgaagaaagaaatgtcagatagtgataagtgct

SEQ ID NO: 5786 - DNA, 585 bp, Homo sapiens
ttatgttgtttgtatcctagtgaaaattacacagaaacttatacctatcggagagcaaacataattgcaatattttgtgtaagcacgactcaagaatgtttggttagttgccttatagcccttggtttcctcacctgtcagagagagtaatgattttcttatagaattatgagaattaaataaaatatgttacatatattaaatgaaattatcctgtggcagaaattattctgtgtcagatctgtttgacttgaaatataatttatttatcataattctaagagaaaagcatatgtatgtgtatgaacatagatagattgacagttaattggctagttcctggcagttgtaattacataataaactctcttaactaacttgagtcctgcttatataaaacgttgcaattaggccaagtgcagtggctcactcctgtaatcttagtgctttgggagaccgaggcaggaggatcatttgaggccaggatttcgagaccagcctaagcaatataggtacatcctacgtctacaaaaaataaaaacattagccagacacagtggcatgcgcctatagtcccagctactc

SEQ ID NO: 5787 - DNA, 451 bp, Homo sapiens
gatatcttgaagccaggggtggtttaggattagggtatgtcagtgtcagatttggactctcagattccctcccctgggagctgcttcagggggtgccccagaaactcacccaccagcaccagctcagtagtttgtcttccaggtgacagccagaaacagcgtggctctcaacagccaggcattctgtggaattcctttcggcctcaggagtgaaggacaactgtggggttcagggtgttccgcaggcagcagtgaggcttcagtggttttcctcttacctgagcactttgtcacagaaactctccttttctctgtgtgtggggggtgtgctgtgtgcagtgtgatgctgtgtgcacataaacatttgataatctgtgggctgtcagctttgcttagtggtgggctttggaagaggtgaaagctgtgtgtgctgtaataacccgataccctg

SEQ ID NO: 5788 - DNA, 539 bp, Homo sapiens
gagtatgtttatgtgctgaggaaaaggagctaatagaggagcagctggagataattgctgcagaggaatgatgcccctggacaaaggagtcctagaaagcatttgcttgtggcctcaccttttataggaggacagttctcccactgattatgtggaaaaaaggtaaatagaggtgtggatgctaataagtttatggggcagaggaggattgcagaagaagctgggcatgtacttgcctgatggcttctattttgtgtgtgtgtgacctattagagtgctaaggaagtggattggatagggggcttaagaaagtggtgaaattggaagcaggtgttttaggggacccatggaaggatttgtgggcagctgaggttgggtgctgtgactgcgcaggggcactgacctgcatggttgttcattttctccaccagtgcagcagctaggaattcacgtgtctgaggttcacatgtctagggtcagacttctgctgcagagcaggggaaggggtatagctcagtattagaggtcaagagaattga

SEQ ID NO: 5789 - DNA, 546 bp, Homo sapiens
agagcttgagtatgtttatgtgctgaggaaaaggagctaatagaggagcagctggagataattgctgcagaggaatgatgcccctggacaaaggagtcctagaaagcatttgcttgtggcctcaccttttataggaggacagttctcccactgattatgtggaaaaaaggtaaatagaggtgtggatgctaataagtttatggggcagaggaggattgcagaagaagctgggcatgtacttgcctgatggcttctattttgtgtgtgtgtgacctattagagtgctaaggaagtggattggatagggggcttaagaaagtggtgaaattggaagcaggtgttttaggggacccatggaaggatttgtgggcagctgaggttgggtgctgtgactgcgcaggggcactgacctgcatggttgttcattttctccaccagtgcagcagctaggaattcacgtgtctgaggttcacatgtctagggtcagacttctgctgcagagcaggggaaggggtatagctcagtattagaggtcaagagaattga

SEQ ID NO: 5790 - DNA, 585 bp, Homo sapiens
cagcattggcactgttggctttttgggctggacaaccatttattgtgagaggcttctctatgcactgtaggatgtttagcagcatccttggccctactccctagacgccagtagcaaatccaccaccctccctcccctaccccagggttggttgtcagttgtgacaaccaaaaatgtctccagacatcgccaaatgtcccttggggggtaaaatcaccaccaccatacctcttttgactaaaagagtttccagaatagtggcagaatatataggtcaagcataacacattacaatcaagattcagaacatcaaagattcttttttaatcctaaaagaaaaagtttggaaaatctacaaaaagaagtgtgaatttgacaataactatttcactagcaagggtaggcgtaagcagaatacaggtagcatattcaaactgctgtggaaaaacaacatcaaacctagacttctctccccaaactatcattcagagtcgagggcaaaataaatagattttctgacttggaacaagtaggaataatgtacttatagtattcatcttcatacagggatggactataagtgat

SEQ ID NO: 5791 - DNA, 590 bp, Homo sapiens
tgagggagaaacagtagactagccaagcatgcatgaataacacattgaaagctttccttctcagaggtctaattctgcaaagctgcattttcaaagatctgacttgcctttgcatggaaatcagtcattcattcattggtcttctatgctgtacaaggccttctgctggggtgagggggaaactagggagcccggggacctctccaacatattctttgctctgtacacttaatcaagataagaaataaagacagcaagactgcaaaaagtctattatgtagacttgcaaaaagtctacataataatataaattcaagccaagtagaagtgattttgcaagtctgtgtatgattaattggctagtgaaatatatggataaaattagttgtaggaattaaagcatctgaagtgatctcttgaggctctggtggcaaagcagaaaggggaatttgaatttgaactaggtttaaaagtgtgagtagtagccctttcttttggcaggggaggtgatcctacccattctccttagagcctgtgcaattggtctcagtgtttctcaacatctaagaatgaagctgcattcttaatgc

SEQ ID NO: 5792 - DNA, 613 bp, Homo sapiens
ctgatctagtaagaatgtcaaaattgttactatatttgtacccatgctcttcggtttagagggcaggtgcttccgtgtgtacatagaagcagagcttgttggagaagaggagctaaaaaggaattagattagaatccacctctgtacaatggcacgctcccaaaagctcattgttaaactttcgagaattttgagagccagttgtaaaacacagccattataaaaactaaatcatataaacttacaattaaacacattatatgaagagccaagataataaatactcaaaactcttcctaattattttgctatgtttcactattatctattctcttgaggttagttacatctattgtggctatatggtggaaatactgtataaaatgctgtgcaactgagcttctcctcccaattcttcattcagtgatgtcatattcagaacttgaaattgaccatgatggaagtaattacaccacagaaatcagcccatgctacaaagcagactcccctcccctcacccaagaacttgttgctaaacattgactagcacatcactgaccctaagggatgcggtggtaaaattagcctctgcattggagagccaagcggaata

SEQ ID NO: 5793 - DNA, 569 bp, Homo sapiens
gtggtaaatgctaaaaccttccttctcaaggatagttcttttgtttgtttatttgtttgtttgttttcgaggcagaatcttgctctgtcacccaggctggagtgcagtcgtgcgatcttggctcactgcaacctctgcctcccgggttcaagtgattctcctgcctcagcctcccaagtagctgggattacaggcacacgccaccatgccaggctaatttttgtatttttagtggagacggggtttcaccatgtttgccagggtggtctcaaacccctgacctcatgatccacccgcctcggcctcccaaagtgctgggattacagatgtgagccactgcgcccggccaaggatagttctttattataccaatcacatctcccttgtgatttgattaacaggttttttttcccctgcaaactcaccacatagtcttatagtgctaacacctctagaacaatgtagagctccaactaaaggtttttttgtttgtttgttgtttaacttaattgaaactgaatagattactacattaattccctgaggaatttaggatttctatctaaggc

SEQ ID NO: 5794 - DNA, 583 bp, Homo sapiens
gggattacaggtgtgagccaccgagtctggccctgtgatccatcttgaagtaatgtttgtatattgactctatttttgtttgcttttactttaccctcacctgactgataaagttgagagatcctcattattttcttcttgtggggtaatggcagaagactgctctgtaacttttaccaaacaccttaccgagttgctgcagccaattcgtttatatgtcactgaaaactcagacaaatcgagtcatttctctgctttttaaaataattactcctcatcacactttcagggcctccaggggcctggtttgaaagcagaacattcaggaaagccataggaaaacagcatcctggcttaacagctcattgagaacgggccaggatgacaatggcggctttgtggaatagaaaggcgggaaaggtggggaaaagattgagaaatcggatggttgccgtgtctgtgtagaaagaagtagacatgagagactcttcattttgttctgcactaagaaaaattcccctgccttgggatcctgttgatctgtgaccttacccccaaccctgtgctccctgaaacatgtgct

SEQ ID NO: 5795 - DNA, 566 bp, Homo sapiens
gctagaattatggcgacctccgcgacgtcgccgcacgcgcctggttttccagctgagggtagatgcggttactatgtggaaaagaagaaacggttctgcaggatggtggtggccgcagggaaaagattttgtggtgaacacgctggagccatggaggtgtggtatcgccctactctctcaagagtcggaaataagtatcctggtcctgtcggtgctggaacccggcccctcccctctttgacagctttctgcttgtgtcccctggattctccagctttcactttaataaacccagttttgccctccttgcggagcgattatgagttctagtgatgagaaattttttatttttctaagtagagcgccagcagtgacccatttattttgatctatttatctcgatcttaactcatggtaatgctaggttttaatttttaccccaagctaccgctccgtcttcctgctggaaagtggtagtttagaaaaagtagtgattgaagtcccaaaggtttcactagttgtgttctaattgttatttcatgaaagagaagcacttctcgtgaatg

SEQ ID NO: 5796 - DNA, 566 bp, Homo sapiens
caacccttaaataacaatatccagataatattgttaccagcggtgagtccagctatctggagaaactccagaatggcaactttgtggcaatttcagttctttgtcttctggaaggaaagatttcaaatgagagacacaggcaaggtttaaagcaggagggagaatttattttaagcaaagcgagaatttattagagagagtacacttgaaggagagccatgtgggtgacttgaaaaatcaagtgtgttgtttgcttcagtcacgccccccacatccatgcctgggcagttgtttaaaggtattttgttcctaactgcctcccccattatcttcatgtacctggaatttgtgatacaatgaacaataatatagccaatccatagcttatgttattttaatgtaaattctttgtaaacaacttaggaacagcctcttcctttatctttaaaatcccacttgtaactgctactaattgaagtgtatattcagggcacttgaatctgtgctcccactgagctgttcttaagttttgggctctggtgaactctaaacttagtcatagaata

SEQ ID NO: 5797 - DNA, 198 bp, Homo sapiens
tgagcgtttttcctttggaaattcatactacaccctcgttcccagggaaggaaataaattgatcggtattgcacaagaacgagatctttgattcgtgtcaagattcgtttctaaccaaccagccagagctgaattgtttctcggtggtgagcctggcctaacaaacgtatgagaggagaggtttggattttttttttt

SEQ ID NO: 5798 - DNA, 614 bp, Homo sapiens
ggactcagtggtggaggatggcttgaacagacagattctgtcttaactaataagattggaactgtattaggattcaacgtgggcagaagtgctggtgggagatcgacggtcagggagattaaccgagatgcttgtcattttcctggttttccagtccttcagtcattccttcctaaacacactaatgtccctgccctctattttctcctcatggccttgtttctgcagcagccagttagtgagctgcctgagaacctgcaggtcagtgtgcctgtcatcagctgccggagtaagcagggttgccagtttgatttggattccatttggacattcatctttggagttcctgcctccagcggaactgtggtctcttctatccataacgtatgcacagaagctgtttttttattattgggaatgctccgcagcatgctgacttcaccttggcaatcagaagaagagggatcttggctccgagaatatcctgtgaccctgatgcagttcttcagatatttgtatcacaacgtgccagaccttgcctccatgtggatgagccctgacttcctgtgcgcattagcagccaccgtcttccccttcaatattcgcccttactc

SEQ ID NO: 5799 - DNA, 459 bp, Homo sapiens
gtgtatgatgacaactcggtgatgctgcatactcccgagtgcgcggtggggtaggcctgagagccgaggaaaactgagcgtgggcctcagaaagaagttaaggcacccgcgagccgggcaactgccctccttccgcgccggcggagcgattaaagtgaagaaacaatggccagcaatcacaaatcttcagcagctcgccctgtttcaagaggtggagttgggttaacaggaaggcctccttctgggatacgacccctatcaggaaatattcgagtggcaactgcaatgccacctgggacagcaagaccaggttctcgtggttgtcccatagggactggtggagttctgtcttctcaaatcaaagttgcccatcgccctgtaacacaacaaggtttgactggaatgaaaactgggacgaaaggtccccagaggcaaattttagacaaatcttactatctt

SEQ ID NO: 5800 - DNA, 78 bp, Homo sapiens
agtgttacttagagtatcctcactttccctttttcttatagaatgttgttataatgattcatttaattatttaatatt

SEQ ID NO: 5801 - DNA, 595 bp, Homo sapiens
gggagcccggagcgtcgtggaaagcattggacacatttccaccatgctaatggcattttaaatatatttggcaattttcccaattttttactgaagaaaactgtaagtttatacttgaggactgaagtgtgactctgccgattatcaggctttcaagatgaatctggaaaaactcagcaagcctgaactcctgacactatttagtattcttgaaggagagcttgaagcaagggaccttgttatagaagccttaaaggcccaacacagagatactttcattgaagaacgctatggaaaatataacatcagtgatcctttaatggctctacagagagattttgaaacactgaaggagaaaaatgatggcgaaaagcagccagtctgcacaaatccactctctattcttaaggttgtgatgaagcagtgcaagaacatgcaggagcgcatgctgtcccagctggctgctgctgagagcaggcaccgaaaggtgatcctagaccttgaggaaggaaggcagcggcatgcacaggatacggctgaaggagatgatgtcacctacatgctagagaaggaaagagagaggctgactcaacag

SEQ ID NO: 5802 - DNA, 552 bp, Homo sapiens
gagccttttttttggggttgtggggtgtatacctaagtagtcatatgttttcacatggtcagagttttgataataatactctacctagcttctgaacagtttaataatagatttaatccgtgagaggaaataccctcgaaagttactatagaaataacaccttactatctggtggcatttacttagttcttagaactgactaattagtttatcggttaaagtaatttgctattatattgtaaaatagtacatttgaggctcacttataaaaattggaaaacatcgaaatataagaggtccaagagggtgtttgaaacacattttgctaagttgacaggaaattaatagactttttatgggccattaactaataatacactcaaaaaaaaggtacagttaaataaaggttttaaatagtctataccgtatactaaaactaaattaatatttaggactgaaataacatatcgattaagtaccagctatgtacccaaaaaatgctgggcacagaagttagagtaagatgttttacttaaagggcctttgagtgag

SEQ ID NO: 5803 - DNA, 619 bp, Homo sapiens
caacgtgggcagaagggctggggggagatcgacggtcagggagattaaccgagatgcttgtcattttcctggttttccagtccttcagtcattccttcctaaacacactaatgtccctgccctctattttctcctcatggccttgtttctgcagcagccagttagtgagctgcctgagaacctgcaggtcagtgtgcctgtcatcagctgccggagtaagcagggttgccagtttgatttggattccatttggacattcatctttggagttcctgcctccagcggaactgtggtctcttctatccataacgtatgcacagaagctgtttttttattattgggaatgctccgcagcatgctgacttcaccttggcaatcagaagaagagggatcttggctccgagaatatcctgtgaccctgatgcagttcttcagatatttgtatcacaacgtgccagaccttgcctccatgtggatgagccctgacttcctgtgtgcattagcagccaccgtcttccccttcaatattcgcccttactcagagatggtgactgaccttgatgatgaagttggatctccagcagaagagtttaaagcgtttgcagcagacacagggatg

SEQ ID NO: 5804 - DNA, 286 bp, Homo sapiens
tccccttcaacatctgtgaagctgtgagttaaggatagatggcaacctaaaaacgaatgtacggcacgtcagtcatgtttcagagcaaactggatattggtgaattcataccagtgtggaaatccattgacaccacaaaggcaagcttttctcttacttagccatgaccaatggtcacagcatctcactaatctgtgatataaattatgtggcaaatatctaaagcaacaaagttgccaggatatacagcaaaaacagtgttccatagaaacatggaaatggtatg

SEQ ID NO: 5805 - DNA, 505 bp, Homo sapiens
aggacataatccatgggcctgtgtccaagcctgttatgtttatcataataagaatccagggctaaaagatagcatgaggaagccaattgcaggtcaatcgtggatcagacccctgggactgatcagaccagagggttccctggacatcagcatccccagaatctccccctagggcaagagaggcgaggacgggtaactcagaaacctcagtgaccacagcttagcaggaatcttttggcgctgagctgtgtatacagatttgccctgccagtgggtaccaaggtgccacttcaatagcctaaatctcattctttgcaattgaagcaagcattttgattctgttcctgaaaacaattctgctcactggggaatgcggttatgcctgttactgcccttctgagtacactttaaaatcttctccgcaaacccaatccaatatgttcacagcaaaccaattaacttagggaagccttgctttgggttagaaaacacttctgggttctac

SEQ ID NO: 5806 - DNA, 425 bp, Homo sapiens
gttaaaacagaaaggaagacaatgtgctaaaacgaaaaggaggacttaggaatgaatcctatctactttttacatgactaagaccattttaaatagtactggggaataacttcaaggcaagaaagtgaatgaaaagctctatgtatggtgaaactatgagagacctataatcccaaacctcaatctaatgtgaaagttaatatcaaattgagatgcaaagctggcagaccattattcgttgaaataagtgcatatgctgatgaatatcaagaggacaaaagctctcatttgatcccagggagataagttatagacttatggtagcagtttcctgggcccagataagcatatagaaagaatgaagaggggaaggcagaatgagtcacacagatgagccatgtatgtgcaggaggaaggtattgagt

SEQ ID NO: 5807 - DNA, 445 bp, Homo sapiens
gtagagtaaaatgggggttgggggaactcctcacccatgaaatgaatatcttgtgagcgggttagtctttttccatctattgagtcagaatctgggtgagtcacacacttcaggtgacagatgccaaaacaccctcaaaattaaccaaagggtgctgcttagccttgcagagcaaatacaaatattcaaacaaacatctctccaaaaggcacctctccactttccgctaactaaccgtctgtgctatgtctttacctagagccccgtgcttgggatgggaacagacgtgttcctgcacagccctattattttcttgtcagaagcctgattagagtgatggagaggtttataatgtgtcctgttttcccctgtaaaaaacacatttctcctaaagccatttaatatttcattgccagaatatccagtgatataaaaattctgaaac

SEQ ID NO: 5808 - DNA, 194 bp, Homo sapiens
ttttcctttggaaattcatactacaccctcgttcccagggaaggaaataaattgatcggtattgcacaagaacgagatctttgattcgtgtcaagattcgtttctaaccaaccagccagagctgaattgtttcgggggggggagcctggcctaacaaacgtatgagaggagaggtttggatttttttttttttg

SEQ ID NO: 5809 - DNA, 559 bp, Homo sapiens
cagaaagcaataattaaaaaagtttacaatgactggaaagattccttgtaatttgagtataaatgtatttttgtcttgtggccattctttgtagataatttctgcacatctgtataagtacctaagatttagttaaacaaatatatgacttcagtcaacctctctctctaataatggtttgaaaatgaggtttgggtaattgccaatgttggacagttgatgtgttcattcctgggatcctatcatttgaacagcattgtacataacttgggggtatgtgtgcaggattacccaagaataacttaagtagaagaaacaagaaagggaatcttgtatatttttgttgatagttcatgtttttcccccagccacaattttaccggaagggtgacaggaaggctttaccaacctgtctctccctccaaaagagcagaatcctcccaccgccctgccctccccaccgagtcctgtggccattcagagcggccacatgacttttgcatccattgtaaaaccactgcgaaaatttccccaaagcataggtggctttgtgtgtgtg

SEQ ID NO: 5810 - DNA, 657 bp, Homo sapiens
acggtcagggagattaaccgagatgcttgtcattttcctggttttccagtccttcagtcattccttcctaaacacactaatgtccctgccctctattttctcctcatggccttgtttctgcagcagccagttagtgagctacctgagaacctgcaggtcagtgtgcctgtcatcagctgccggagtaagcagggttgccagtttgatttggattccatttggacattcatctttggagttcctgcctccagcggaactgtggtctcttctatccataacgtatgcacagaagctgtttttttattattgggaatgctccgcagcatgctgacttcaccttggcaatcagaagaagagggatcttggctccgagaatatcctgtgaccctgatgcagttcttcagatatttgtatcacaacgtgccagaccttgcctccatgtggatgagccctgacttcctgtgtgcattagcagccaccgtcttccccttcaatattcgcccttactcagagatggtgactgaccttgatgatgaggttggatctccagcagaagagtttaaagcgtttgcagcagacacagggatgaacaggagccaatcagagtactgcaatgtgggcaccaagacatatctgaccaatcacccggctaaaaag

SEQ ID NO: 5811 - DNA, 623 bp, Homo sapiens
ttccttaaaatgtcaaaatgaaatattatctattaaaacagaagaattaaaataaacaagagaagttaggtattggtcatctgatggttgtaacctccagctttcccaggaaacttggttggacccttttcttgtgttcagctgtcagaagctaaatgttcccttcctctctctctttgcagtctgttcgtgacatttggtattcctaatatgcccacttggaggaaattgccagcttaggccaaccagggtgaaatgcatgcgcttataaactcataagcccaataataattttcagaaggaggcactcattcacttcggcttataaacttacaaatctgtagattcattagtctatcacttacatggaaagacaaaatttatatttaattgttgagacttgacttgaaaattttcaagaatatcaacatttgtttttgttgtgcacctctctgtcaaaagataaatacgtagtacagaatcattatttatttattaataatatactctgcatggtcttacatttcatagttcatgcattgtttattcattaatataacctgttaacgttaatatgcaccacattaccaagagcccttgtcaactcctcagaagccactaac

SEQ ID NO: 5812 - DNA, 468 bp, Homo sapiens
tagcctcccgagtagctgggattacagtcatgtgccaccacacctagctaatttttgtatttttagtagagacagagtttcaccatgttggccaggctgttctctaactcctgaccttgtgatccacctgcctcagcctcccaaagtgctgggattgcaggcctgacccactgcgcccagccaagaccttcttttctatcactgatatatgtctgttttcttaactctttcctagaaatccaaatattttgctacattagaaagtagagcagaacaaactattgaataagtgcatcttcaccacaacttaaacattatgacttttcactccaccctctactgtgtagatatatcacaacacattcaaaattgtgaacagataatgttagtagctgcagtatgaccctaagttattttagtgataaactactaataaaaaatttcaggccaggcacggtggctcatgcc

SEQ ID NO: 5813 - DNA, 571 bp, Homo sapiens
aacattgtaatacagagcatccccaattagtattcacaaagtttattctaattcagttgtatattccctcaatcaccctaaatcacagaagcagtctttctcagaaatggaaggcatttcagcccagcttcctatcccaataggagtcccttttacaagcatccaggtggcttatcatttagcctttgcttggatgctttcttcaatgggaaacccacacctttctgaggcagctcattgggatttttttccaaggtcagtggggaaaaaaacccaggtatttggggcatatagtgtaactggtgattgttactgatttactattttgcccacatcttgtcttttgttcgtgatagttctgtgggaattgcctattcctggtataccaggaactctcttgttcttcctttgaccctcatccctaagttacaacaataacttaatctcccactataatttgtttccccagaaacagaaaataaggtttttgggatgagggtgaaatgagacagagtcattactagtaaatttgactcctggagcatgactttgccattaaatcaacttttgg

SEQ ID NO: 5814 - DNA, 594 bp, Homo sapiens
tacacggttttaaaatatgaatggggccataatatgtctattattctaaaatttgattttaaatactcaatttttttagagcagttttaggttctctgcaaaattgggaagaaggtacagagagtttccatatatacactccccgctcccccactgaagtagctgtggagtgacttgtaaagaaattgtggaaaacattccctatcagcacataaatgaaccaattatttaaaaaggtggatgaaaagccatgttgtggttataatcaacatctatttaatcagtccatatttatggacttaaagatgtttctggccaggcgtggtggctcacgtctgtaatcccagcactttgggaggccgaggcaggcggatcacaaggtcaggagatagagaccatcctgtctaacacggtgaaaccctgtctctactaaaaatataacaaattagccaggcgtggtggtgggtacctgtagtcccagctactcggaaggctgaggcaggagaatggcatgaacctgggaggcggaggttgcagtgagccgagatcgcaccactgcactccagcctgggcgacagagtgagactccatctc

SEQ ID NO: 5815 - DNA, 496 bp, Homo sapiens
gctagccaagtgtccgttcgaggtgatccagttgcctttcttcttccaattgctgagctggattcttttaaaacaaacattttttgagctccttccacaagcaagctaagtgcaggtcataaaatggtgtttttggctggacaagatagctcacacgtgtaatcccagcatgttgagaggctgaggtgggaggatcgcttgagcccaggagcttgagaccaggctggacaacatagtgggaccttgtctccacaaaaacatttacaaaagttagccaggcatggtggcgcatgcctgtattctcagctacttggaaggctgaggcaggaggattgcttgggcccaggaggctgaggctgcagtgagctgtgattgtgacactgcactccagcctgggtgacagagtaaaaccctgtccttaaacaatgaataaattaaaataaaatggtattcttgtccctcaccttccctgacaccatagaacctataggatgct

SEQ ID NO: 5816 - DNA, 641 bp, Homo sapiens
attgcatagtttcagatagctagaaggagtttattaaatgttcccaatacaaagaaatgataaatgtgtgtgatgatggagatactaattaccctgatctgattatcatacattatatgtattaaaacatcactatgtacctcatgaatatgtataattattatctgtcaattaaaaaataaattttaaaagaagaagaatacatttgactaaataaaaataaattttgcatggccaaaaatacaagcaatttaaatggaaatctagcaactgagagaaaatatttacaacataaagggctagtaatatttctaatataaaaagtcaaaaactgagggaattaaaaaacaacaaccaatgggaaaaaatgacaaaagattttaacagataagtcacacaaacacaaacacacacacacacacacacacacacacacaatacagaagtggtccttaaacatagaaaaagatgttcaacttcatttacaataaaataagataaatgcaaatgaaaaatacactgagttaatatttgtgatcctgtcacctggcaaaactaaggagcatttgctgctgaattctaccaaacatttacacaaaaattagtatcaattgtactcaaactatttcacacaactgaag

SEQ ID NO: 5817 - DNA, 657 bp, Homo sapiens
ggaaagctgcttctgccccattcctgttttagcaagtcctcattgttctggtgtctgagccctgcctctgaagcagagtcccaccttctacctcattttgtcacaaggtctcaagtgcacatcccatattatttctaatacggtaatgtttatgaatcaatgactgtagttccacaaccaaacttccatgtgattaaataataaaagctgaacacttccatgtgactccatgtttcagcacagagaagacttaaactttaatcaaagaaccaaaaaaactgggagttgcttttcttcctttggtgaaagggcaacaatttttttcccctttaggtctcagagtgctcacatttttctggcccccatcatccctcataaccactcttcagtgcaatctgatgatgtaccaaataatcttgaggatttttcctttagattctacaacacctacaaatattttagaatgatttaaaaagtgattagaaatacataaaccagggctgggtgcagtggcttacgcctgtaatcccagcaccttgggaggccaaggtgggaggatcataaggtcaggagtttgagaccagcctggccaatatggtgaaaccccgtctctaataaaaatacaaaaattagctgggcatggtggcacgtgcctgt

SEQ ID NO: 5818 - DNA, 412 bp, Homo sapiens
gtcctctcctggagagggtaaacccgcccctgaagtggtcaccccagtacccagccttctcagtctcctcccccactccttttgcattaccgccgtcctttactgtgccggagccttaggatctacaatatggctcatttcagaaaagcttattttgaccaagggattggcacaaattctatggcagcagacacagatgagaaacaaacggttcactgtgctaaacggggtgggggtgagaaaaaaacaatccagagtgctctcttctactggccttagctccgtatagatccgtccttgctgggctctgtcttaagaacgatacaatttaaagtcaaagaggaatcgctagagttagctctagagtaaacctcgttttgcctattttgttccctttttagagatgtgaata

SEQ ID NO: 5819 - DNA, 459 bp, Homo sapiens
tgagaatccacgtgctagcattctaaaccacgcaccaccccgagaggaattcccggtaagcagtggggccgactgaaacccacaatgctgtctttctaaagtacaggctcccacacagacctgctttgctttaaactgtcattacaatgaaccatcacttgaaaacctccatgatcttgacaaaattggaacagtgatataaaaataaaaggtcagaaaaaccatgtatgatagagctgagctggcctggtatagatttcttcaaagacctcctttgctcactactaaagccaagacgatgtgtcaaagttgtttaagagaggaatcatttttaatcaatgtgacctcagctttccaaggtgcttaggtctgggaacacttaaagtacatctgttattattttggttgtgctgaatttcttattttatatggtttcatttcaagaggggctatttgagg

SEQ ID NO: 5820 - DNA, 368 bp, Homo sapiens
agataagccagtttaggtgaaatgaaattctgacctaaatataaaacaaaagtttcatttctgcctctttgctagaaaggttccttattcaaaataagaactcctaagacatttaaaagaagagctgttcctcggctgggcgcgggatcacgaggtcaggagattgagaccatcctggctaacacggtgaaatcccgtctctactaaaaatacaaaaaattagccaggcgtggtgataggtgcctgtagtcccagctactcgggaggctaaggcaggggaatggcatgaacccaagaggcagagcttgcagtgagccgagattcaaccactgcactccagcctgggagacagagtaagactctgtcta

SEQ ID NO: 5821 - DNA, 574 bp, Homo sapiens
acctaatagactgcagaaaaagaaaaagctaagtaccattcaagattttttagccactgggttcagtgtgactgcaaaattaggctccagacaagtttttctgattgcaatgctgctctgagcaggccatccacacctaccagtgaatcgaattgctctcgcgggcaagcaaacaggcgtccattaatggtgagcgtcgtaaatactgaaacatcattaggtttgagcaccaccttttctgtgaacataaaaagcatgagattgcctattaaatacatctgagatttgctgcactgccctaatcacaccaacaaattgccagcttggtgaattaccggaacacgcagagtgactgcataaaatagagtactgaagggatccacggaataaaaaagacggcattcatgcagccctgcgccactcaggatgccttcagaaatggccacaaaaaggaatagagatgccagagggtcaattcacccagttttgtgctgcaaccataattactgagcacataaaacccgcacttgctatttatctcacaagttatgtttccagatggtaatcacaccca

SEQ ID NO: 5822 - DNA, 304 bp, Homo sapiens
tcctttccttttagtctttatctcattgttatatgtgattataatgttgtcatttatgcagttgtatgttctattttaaaccttaaaatttgttacttaccaactttttgaatatgcctgactgaaatgattcatactgtagcatgtgtgactcagggtagtgaaagggggtttgttttgaatagcaagatgagcatcagactagtcttccaccagaaaacattccatgcaacttgagacacagatgaaacagcaaattttcttcttggcttggggttggataaagggtggattgacttatgta

SEQ ID NO: 5823 - DNA, 484 bp, Homo sapiens
cccccatcaacaaatattagtctgtattttttcattttgtttaagatatattttctcatagctgagtttttaattggtagttactttagctatgtattccagatgatatattttgattctttcagctattcttaaaaaataaaaccagtgattttacatttgctacaaagtgaagttttaaatgatagcaaatatcaagaatcaacatttgttaaactacaaaacaaaaagacctggaggaaactagtaaaatgttctgctttaagaaagccaatagggccgggcgtggtggctcacgtctgtaatccagcactttgggaggttgaggcgggtggatcacctgaggtcgggagttcaagaccagcctgaccaacatggagaaacccccatctctactaaaaatacaaaattagccgagcgtggtgatgcatgcctgtaatctcggctactcaggaggctgaggcaggagaatcgcttgaacccg

SEQ ID NO: 5824 - DNA, 308 bp, Homo sapiens
aacacccggaagagtgcctggcacatggtaggctctcaataaatgtttactggacaagctaattcatgcaatcaatccttccttcacttgccatgtatttctggagagtctacccagtgtcaggccctgtgccaggtgcctggattccagctgtgatgaaaatgcaggcctggtctaaggatgaaaagtcataattaaagaatagggagagggggacgtgatagtttcagaaacaggatcttactacattttacaaaaacctcaggaggcaggtattgttcttattttacagatgagggacgtgaaga

SEQ ID NO: 5825 - DNA, 366 bp, Homo sapiens
tgtggggtacattgtcaagccacaaacataacctgctctgtaataataccctcctacattggtatcttgctttggcacagtatgattcaagtcttaatcttaacactaaaattaagtggtttcactctattaaaggcatcatcctcaactgaaactcactaaagcatatacacgtcacgtggaacagctgaacacaaagctcttaatctgaagttgacctatttagtaaacctatagctcagaatttgacctcatcacctcagaaaatcagggataaaatctgtctttatattgtttcaggtacttgggtatcagagacattatttgtttatcaagacctaacaaaacactttcttattttttaaa

SEQ ID NO: 5826 - DNA, 580 bp, Homo sapiens
gggttcaatatcaaagaaattatctcacccagactgatctggatattggcactattaagtgccccaactgttaacctcaaagaccattaaagttgctcctaacttgtttccaagatccaaactccttaaagtagggcatgaagtgaaagtgtgacctaaactgtctatgataatttgggtgttacctaagttagcaaattataaaattgggcttgtgcatcagcatttcactgaaacctggagagaaagtgtatgaagacaaagaaagactgaaagaaactagcacacaaacagaaagcttagacatccagaggaattgttcccactgctttccttcccctccttcacaccatgctctgcctacatggggagttttccatgaccacttgatggtgaaggagaaaacatccagtacaccgtatgtcaacagtacatggaagtggagaacttctgtctcatagccccattcaggcaagacctaaagattatagtaaagggactaggtgcagtggctcatgcctgtaatcccagcatttggggaggccaaggtggaccaatctcttgaggtcaggagttcgag

SEQ ID NO: 5827 - DNA, 581 bp, Homo sapiens
gcaattatatttaaattacacctgctcctattccattaactagcatattgtatggtgaaacccaacttcacagacgcagaggaggacacttttccttatcatggggcaaggaaatattcatatttgtgagcaataatacaaactactacagttcttatatgtattctgttaaattcttggtcctatgctcccccgaaagagggttgagcacctattattgcagtaaccacatggaaagggaagagagtaagagaaaagcacctttaattaattcaaaaggataaggtgcagaaaattaaaaaaactgagccatttgagataaggaattttaatgtcttcacacagtattcaattctaggaatagactaaggtgaaacaaattactgtgaacatgcttctcattgcaaagatttagaaatacaaaaatactttatatgtacattatttagtagggaagaaatgtagctccttggcattggacaagaattgggagttgaaagccaatgtggtagacttgagaaggtgatactgtggcagtcctgtacatttagagaatcgagaaataggccctttgtgttaag

SEQ ID NO: 5828 - DNA, 602 bp, Homo sapiens
atggaaacttgccacatattaagacacaaaggaaacttcagtaattccacaaagcagagagaatctaaacatattctctaatcacagtacagtaaaactagaaattaaagactcaaaaattccctactggaaatgttactaactctatttaatttgttcaaaatggtaacaccttgtatcagaatccatgatgcaattaaagcaatgaggcaaagaaaattacatccaaaatgaaaaagaaacatcaaatgcaaaattaggaaaagattaaagtaaacaaaggagaaacagttgcaaaataacaagcaaggctgggtgtggcagctaatgcctgtaatctcaccactttgagaggctgaggcaggcacactgctttgagaccaggagtccgagaccagcttggccaacatggtgaaaccccatctctgctaaaactacaaaaattagccgggcatggtggctcacacctgtgatcccagctacttgggaagctgaggcaggagaatcgattgaacctgggaggtggaggttgcagtgagctgagatagcaccactgcacttcagcctgggagacagagtgagactcctccaaaaaaaaaaaa

SEQ ID NO: 5829 - DNA, 377 bp, Homo sapiens
catacttttcaaaaatgttcctgcctattgtaagttccttgtgagcagtgactgtttcatggtattgtcacctgcacagttcctggcatttattcatgccttgataatgttaatgaagtgaatgaattaatatttggatgtctgtatccttcacaataattgtactgaacaacggcggtatatatatccatcgaataattcctgctcatagtagcaagcctccagtgtttcacctccaaaaatgtccagaataacaacagctatccttagtcaacattttccattaccaaacatttggctaaggaattcacactattgcttcatctgtttgcttcaacaatcccatgagcttagatagagcaacttgctcaaggcta

SEQ ID NO: 5830 - DNA, 590 bp, Homo sapiens
ccatgggaatttttcctgccaaagagaccacctcttcttaacacaggtcagtctccagttggtagatgcctttcactctcccaatggcaggcatttcaggagaaacaaactttttgtcagcactccttaaaatataccttggaggtgactgcatgttctgactaagcctaacactagctgtgttaggtactttggatttgcacactgagttccctctggtgctaattagtattaataaaatggaatttgttatagcattttcattaccaaaatatagtaagtaccaacatttataaaagattttgagcctcactaaaaaatgaggtgaggtagcaactttttatcaccatatgaaatgttttctgtaaaatacaaaaaattaaatctttaattactagaatcaaataaaaaattcacttgtcaaggagtttctttaaaagatactagaaataaagtctacaatattgcatcttctcatctctcttttgaaaactaatttcaagaaaaatataagcttattattattctaatttatatcataacaacttcactctatagatacatgtttattcaatacattagacatcttt

SEQ ID NO: 5831 - DNA, 417 bp, Homo sapiens
  misc_feature 90: n = A,T,C or G
aaggagaaatccggttgttgcggatcttacgtggatgctgatgtatcctttcctgggtttttaatatctttagtcaaaggaatttatttnaaccgatttcttcactatcacccaagagaatcctgtatctagttttcctgacccttagaaatccattgtggtatgtgtcaactcagctaggcaaaaagaaaaagcaaagaatccattgtgggatggatgtgctggttaggtgcagatgcctatagagataggagcattagaaatctagtaatagaaaatattagcaaagactgattaaaacctcctttttctttgacgttgcctagaatatatcatttcattgtagttataatgatgaacttggcttgtgactggtagtcattctaagtatttgatcaacgaagcctaggaaaaaaa

SEQ ID NO: 5832 - DNA, 577 bp, Homo sapiens
cagaaggggattcctgactgggaaggttgcttgacaagtcaggattgtgcctccagtcagaaggaccatgaagagagagaagagggcagagccgtgcatggggctgctccccaggacctgagcaggaacctggagttttcaggtgagtggctcacctgtgagcaggatacctgcctgctcgcctattggtctccagattgactagttacctagctaacatctttcctagtacctgtttactttctttccttcctttcttccttggcgacttctttcccttctccctccttcctttccttccttccctcccaactatctgctttctcagctgcctaattttcttcctccttaactaaccaacttacatcctcacttccttcccactgacttcattttttccttttctagctttctattgtcttcctgaaattccaggccgtgggctttgcagtcagatggcctgggttcaaatcctggttatgtcatttattaactgtcttgatcatgtcacttccctgtccttgcctcagttttctcctccttgaaacagggacgatgatagttcctaacccgtggg

SEQ ID NO: 5833 - DNA, 390 bp, Homo sapiens
aggttattttaagcaataaaaatgctttccaaaccacgaagttgttaaatgtacactaaaagggggtgtaacggaattattttcattctgtgtttgaaaatgacattgtatcttgagagtgaccatacaaactctttgctaaatttcattaattgaaactcatgtatgttcagacaatttttattttcataaaagagcatgccaggctgggcgcggtgatcacgaggtcaggagatcgagaccatcctggctaacacagtgaaaccccgtctctattaaaaatacaaaaaattagctgggcgtggtggcgggcgcctgtggtcccagctactcgggaggctgaggcaggagaatggcgtgaacccgggaggtggagtttgcagtgagccg

SEQ ID NO: 5834 - DNA, 567 bp, Homo sapiens
ggatacaaagtgataaaaagcggtttccattctcaaagatctcacaacctacttggaacctcagaacatacacatgaaaaaatagaccaccttatgaaaaagctatgcaaactgtctacacaagtggagagaaaccttcaaacagagctgggctacagtcgctgtttccctgatcaaaccaggcgcacctggcaaaggagagggccaaggaaggacacctgtcctcatgagaggcagggggcatgggctcctgctctcggaaagatgctgaactcttctgactggacaactctccaaggggcacccttgttagcatgccttgcaaatgagatcgctgctgtattctgccaaatgaactaaggaaaaatacgatcaaaaagaaggaagttctactgctatgtatcttactgactgtaattaagaaaaataaaatgaaaaagaagaaatctcaatgtgggactctcaagggtatttccccaaaatttaagaatgaagctataatcgcaagggcctcaggctagttagtgactctgactcacctaaatcttcatcgagcttcgtctttgg

SEQ ID NO: 5835 - DNA, 601 bp, Homo sapiens
tttggatttttaagcttgttttccttaccaaataaattattgtcttagtttaattatttgcatttgagactaacccttggccaataatgatgtacagaagtccttcactcctggaaagctgaggcttacaacaataacattaggttttcccctcctaaaataaaagtaatcatagttcatatcagggcagaaattcaatccaaattctaaaagatgtgtcttcagaactctgtgcttcttaatcaaccaatagtgtgtttgagacaggctagaaagccaactatttttcttttattgggaatattgttgttactatgaaccttaagtggctcaagaaacttagatttaacctttaaaaggatacctttgattttagtattcccttgagactaaactaagtaatgcacaaagaaagatagtcaagtaagatgacagtctgaaaagagaagctcctttcattccagacagaaacttgctgactccagagattagggcacatcctggctccaatataagcggcaaacaggccagggtacaaatgacaaatactgaaagatatgagaggaaaaaattgaaacatggcgaataattctttcattga

SEQ ID NO: 5836 - DNA, 580 bp, Homo sapiens
aatcatgtgtgcaaaacatgggggaaaacatactttaaactaaaatatagttttaagagacaaatgtatatgatagtttcaagactggcaactagtgctgataatttatttttttgctaaactaattatgcctatttttactactgtcattctggctatcagatatctttctgttagatatcaaattcccagagagccatgttctacccagaggtgtttctttgctctgtttctgaatcggaaaggaaaacaaagagcagtaaaattattttcaagagattaatcataatgtcaagaacaaagctgagatttgattattgacttagaattctgtccactagattatacccttactaattatctatttttcttcactgtgaatctgtcaggctgaggtcacacagtaactgggaaacttgctactccctgctatcttttagccttgaattaggcctgtccaacccttgggactttcataagggaaataaatattttgtgagggcaagaagggcagcttttagaaataaattctattcttttccttattatttatagctctgaatgatatttaatttaaagc

SEQ ID NO: 5837 - DNA, 450 bp, Homo sapiens
gtatcttaacagtctggcagggggtgaagtctcctattgataagcagggcctacatctgctactctactgcagaggtgggtatctaacaactgcttccaaagagtcagtttctcccagggcttgggaactcctttgggagctacactaacttctaaaacatcagggaaccactgaacaaattatcatttcagtgcactcagtgatatcctaacggcctggaaacacagtcctaacctacctctagggtcttagagaacagttcacacagaaggaaatttgctcaataataataacaatgtcaagatactaacatatcaaatagtcttagagggaggctcttgagctacacttctccaggtgaattagcatcttcccttaactttccttcccagcaatgaaaaatgctcaacatgcagtaagaagagttttttgtttgtttttttgctttt

SEQ ID NO: 5838 - DNA, 585 bp, Homo sapiens
ataagccgattaaaaaattgtggcacataaatgaggtcaaagtcaagaagacttacaccaaagcagggatttgcttattttagatccaagccctatctgccatcttactcaaaaatttacagaactaccagcaaccagctcttccctcaattggaaagagaagaatgggctgttttctggctttttgggaagatgcttaagggagtagtctctgtctagcctgactcagaacactgattggaaaggcagcataggatagatgccaggttaggagctgcaaagaaaaaattattgtgtgaattacagtccaagggagactgaagtagtacatacagatacaatgaaaagtaagagagtataggctcttgagaagaaaacagtcaagcctctgtcacaggaaaattacacatgcaaggccagagatgatgcatctccagggaagggctgagaaactaagctagcctgattggtgtaagtgctctcctgtacaaacccatttcagaagactggaaagaggttttttttcatatacttaaataccaagagaagattacatggtatacaaaaaaaaaaaaaaaaaaaaaa

SEQ ID NO: 5839 - DNA, 423 bp, Homo sapiens
acaattaggaagtggatagcattctttcttccatttcatagataaaggagacaagacagagttctaatggaggcattgctttactacagaagaaacaatttttgatatctttgtaagaaagctatgctcatataacataccttattgattccttaaataaaatacattatgtaacagctctcaacggagtaaagatgggatgtggctgagcttttaagttgttttcttaaacatgattgcagttctatgtttaaaaatgagtcaagaacatctgcttctttctagggagatattccatggcttcttaacaactgctctaacttttgtggcagctgtctgaaagttagctgtctcttgaggcagtgatgtctttatcactagggggttttcactaaaatcttagtgatgacttgcagatgtcat

SEQ ID NO: 5840 - DNA, 624 bp, Homo sapiens
tgcatatagtttttgtcttagtgaggtgggatgagtcttaaggtaatttattgagaacagagaagggaggataggttgacaaacaaacattttcaagtgttgtattttggaaactttattaaatgcctactcaatatcagtatgtgaattttacccacacaaatgaacctattcaatagaaattttcttaattactcaacgtaatacacatgcacatgcgcacatgcacgcacacacacacacacgcacatacacacaaacataacccagcctccactacttaagatgagagtatagtctagttaaccaggaggttatgagagttcagataaagtttgtcttttggcgtggtgacagaagcacaaacttcatactgaagacagtctttggcctgagcctagaaaaacagggaagatctgtctcctctgaaaacaggactgtaacagaatcccctttgagtgccaaaatttgtatttgtttacaatgaagagaaaacaattaaaataacatatatgcaatatttcgtgaacagtaatgtgccatataataagtgtcagtcccaccattactgttgttaatgtgtgcattatgattccttcaatccatgcactcttgctgttaaac

SEQ ID NO: 5841 - DNA, 621 bp, Homo sapiens
caatggcatggaaatgacttagaggaattttgcactccctaggaccttctcttcctccttaatgtatttattaatactacacgtttaggattttttaaactgttttaaaatattaagctgaaaagattggtctgtcaattaactgaaaacttgaagagcaggcaatttttattcccatgtttatatcactgtttcttttatgcaactttagccctaggcaaagtagtggagtcagtaagatttccctttcatacccatctaacctttttcagtgcctgtctcttccattttgtgtcttctaggattcttactattatttagtactccaagggcttggtctgtgtgcactgtcaagtcataattttgttagatctatctaataggggcccaatgtactcctcttcctaaggtctacactttgttattgtagacttttaaaaattcctctcctatacaacgtttccaagcaccagtgaaatgaatctgtagtagtgaaatttcacgcggtggctcacgcctataatcctagcactttgggaggctgtggcgggcggatctcgaggtcagcagatcgagaccatcatggctgacacagtgaaaccccgtctctactaaaaatac

SEQ ID NO: 5842 - DNA, 458 bp, Homo sapiens
attgatcaaccgatatctttttgatgactcctagatgcaagggaggttaagaagctgattattttttatctaagttaaaaaagagagagagagaaagaaaaactcagggcaagaagtggagaataactgggtaggcaagtggtggcatcatccacaccaggtgttctgaggctacatcatttatgttttacatcccaccaaattgctcaccatacacacatggaggtgtctatccttgattggactgccctttatgttaatcactgaggtctctttggatatgtgaattgaacccaggatcaatgtgaagtcaccttcaatttaatggaagccggtagcaaaggaaggataaatttgctgggcattactttttcttttctgactcctgatgggctaagtagagaaacttttcattttaagctgatggaagcagcaaaaaatgaaaataaggatgaggt

SEQ ID NO: 5843 - DNA, 515 bp, Homo sapiens
gtactaactggagaagcagttacagttgtacctagcatgcatttctgttggagctcatttcaagtaaatgacttatactttatgtccacagcaaagaggcccacatttgtggcaatcttggtcagtacagtcaggaaggaagtggagctgaagatcactgaggaaccagagaaattagtgtatatctggatttaatgatcaatttgcttatgttaaaaatacatttgaatatgatttactgcccttcagttaatgctagttccttgcttgcagcaggaccaatcaaaaggagctaaaccttaaaacccagatggagatgttgaaggattctagctaaagtttatgcaattaattaggcatcccctattcagaatacactttctatttgtgcttagaattgaaagatatcgtactcccaggtgaccttatccttaattcattccacacatactcagttaagtggcttaaataagtgatagagattttaatttaaatgcgagaatataagtgggcaa

SEQ ID NO: 5844 - DNA, 327 bp, Homo sapiens
  misc_feature 202, 212: n = A,T,C or G
agaaaccctcctggcaacagaaaacaaaaataaaaaacattgaacatagaaactacatgaagaagccacaatttgattggattggtttgtagaggaatttatgtccaggacgttgttgataataatagagcaatcccagattgttaatggagtttaataactgtgtgtgtgtagggaacatgggaagagagccttataagtnccagtgcggncatggcataccctaaactgctcccccctagattttactaaactaaagtaatccagccagtcactaaagaaataaacaagcggccgggtacagtggctcactcctgtaatcccagc

SEQ ID NO: 5845 - DNA, 656 bp, Homo sapiens
atgtttcattcaatggagtgggggttctgaattttccgtcttctttattcttggctcctgttatgttttgaagaatggtgaagaaaattataaaactaagtgacatgattataacaacacactttccaagctcagtgaagcactcaaagctactcaacaatatttttactgagctcttctcaactctctttctcaattcctatagcagctgttctaaaatgtctaccaattttctcaagatctccaggcactcttctcaatcccatcaattaatgtcctgattgataaaacagaggtctctacattcttcctctctatttccaaacttattaccacctacaccttctctacctgcacctttcttagaacagaaaggcttctccaatttgtaagcttaatgtccccatatcagttattgatttttcccgtatcccacacctcaaccctattctattactgataggtcaccccttcttcttagacagatctttcttccttttcacaaatgcataatgtgatatatgcatttgtgtaagaaactcacattcctcaaggtcctaaaaaacagtaaggtttttggataaataacattagtaagaatcttatgcaattctgtaataatcatgataacaccaccaacaatcacaatagatcat

SEQ ID NO: 5846 - DNA, 569 bp, Homo sapiens
aaatgtgtggttcctacctgcttctgtgtgatgctgtggtgctgctgctgtggagagcaggaacatttgagaactgtatgtctggggctgtgactggcaaccttgcatacaaccaccaccaataccaatgtgcagtgctcaggacccagagagtcatcccaccactgctactggcttcactgataccacgttgacttctcggggacatgggaacccatttacccacccagcccactgcagccactacaggctcaagaattggcctactttatcccactaacacaagtgccagcatctgctatgcttgggcccaagagtaagcatgctcagcccactgcttccaccaatggggaccagatatggacccacctgccatccctgcccccagaaaaacttcaccatagcctccactaataattagagcctaaaccacctaggaaaccacagatgttactcatactgtttacagccaaagaaaccatatagaggctacattgccatatgcacccagaatcaaagctaaagggtcctataaaaccaacaccattaatacatctccaggagaaagt

SEQ ID NO: 5847 - DNA, 600 bp, Homo sapiens
gaactgcccatataagagttaataacaatatttggctaggcgcggtagctcacgcctgtaatgccaacactttggaaggccgagatgggaggatcacttgaagtcaggagtttcaaaccagcctggccaacatggtgaaaccacatctctactaaaaatacaaaaaattagccgggcatggtagggcatccctataaccccagatatttgggaggctaaggcacgagactcacttacacctaggaggcagaggttgcagtgaactgagattgtgccactgcactccagcctgggtgacggagcgatactccatctcagaaaaaaaagacttaataacgatattgaaattagactaataaccttacaatgggaattttgcaatgaataaaaaagaggaagaaaatagttataattagattgttttctgaagtgacattaaatggccttcaaggctcaccaaaatgtttcctgaattctaagagcttaaacaatgtgttggccaggtgcagtggcccatgcgtgtaatcccaggcctttgggaggccaaggtaggcggatcacttgaggtcaggagtttgagaccagactggcctacatagt

SEQ ID NO: 5848 - DNA, 445 bp, Homo sapiens
agcctctgacaaacccgagcccggtatgtctttcctctgcagaaagcccatcaatggcttcctgtacattgagaagaatactacattctttatcataacctacaaggccccttcataggcaggttctgtccacatttctgcatttgcctcatttactttctccttcatttgcgtctggcttttttacggttttttgaaaattcccatttcttttgctgcaaaggaagcttcttcagggaagagactgtgactgtcttcttcattgctgaagcatcactgtctatcccagttccttgagcacaataagtattctatgcgtgttttttaacaagtagatgaatttatgacctagtgaggatgatcaaaataagtgcataatctttaaaaatgcaaagtcaaatgtggtaagtttcttaagagagacttgatttaagtagtctgggaa

SEQ ID NO: 5849 - DNA, 211 bp, Homo sapiens
gttttggctgctcaattttaacactccccagagagctctcagacatttatgtgatttaatggcctactattattaagtcagaaatattttattttacattgagattgtattcccttcctaggacttgcttattgatgatgcaggataaatgtaatagtaacaataagtcatcaaacattctggcagacctgtcaggaagaggagatggggg

SEQ ID NO: 5850 - DNA, 406 bp, Homo sapiens
agtttctgctgtttgtagaaaaaaatcaacaaacccacttataggttacatttaggttactaatatatgtggtagcacagctaagtaaactggagattatgctgatgctatgtgcttattattgcagtgtgggttttaatgtgaattttgcacaaatccatgaatgatatgcccatttgcctttttaattttcttgctgttaaaaaattagcttattttgtagccattgaaatatatataaagaaaaaaattaacttctacctgttttttttcttttaaaaatatttttatgtgatctaaccagtctgaaatagttggctgtaaatggatgtggggagtgtcatttcaaaccttttacaatttgggatttcttctggggggagtgggtatcagagctttagttctt

SEQ ID NO: 5851 - DNA, 627 bp, Homo sapiens
atatttgtttatacttagcagtcaacaaagtaactcatgggtaaaaattggtttacaaatcttcactttaaaatgaccgtcttatgaattatcattggatttgtaaaagttactgactttaagataagatgataatgctgtgagaatgatggaaaaactatttgtgactcatgttgtattttagcagtttagataaaaataaaataaatcattcttagatgcagtcctcctatacttggaaaagcatatatttgaataagtatataaaactgaaggcttgagtgtttcagttgggtttcccagaaagcaaattctaagctaaaaaataatatataagaagtattctagtcttctttggatcaaaacctgttgtagcaataaaaggaaaaagattggctagagagagaaaatgaacatctgctgaccccactgggagtgctgaagctaggatggttgtttagagtcacattcttttgctgtgatggggctgggcttttatactcccagggcaaccaatcatcaggtgagactcatccagaagacagtcttgtctttggaaaaggcagctctttttagctgaaacaattcccaaagaggagtgaatactaaagagctggaagcataaat

SEQ ID NO: 5852 - DNA, 597 bp, Homo sapiens
gacagaagggcagctctgccacttatttgtcacaagcctgggtaacttgctgaacctcattttccattttaaacatctgtgacaagggtaatgagagcgcactcattgaacatctagtgcctgtgccaggaactgtgctcagcactttatatgaattctctcatttaatccccaagactgtcattacccccattttatctgaacccacatctgtctggctttattatcctggcagcactcgctggtggaggctgcaggaggatgttttgcaaagcacccacattcaagctttcccatctgtcaccagaaatattctgcaagcatgctgaggccaaacagccttcccccttcctccttccctgccggcaggcagccccgcctttaccaatctggcagagtaggcccctgggacaagaatcccagccccatctcactcacggctcttagaaaagacagtggctggccaggcgtggtggctcacacctataatcccagcactttgggaggccaagcaggtggatcgcctgaggtcagaagctcgagaccagcctgtctaacatagtgaaacgccatctctactaaaaacacaaaaattag

SEQ ID NO: 5853 - DNA, 515 bp, Homo sapiens
ctcccaaagtgctggaattacatgcatacaccaccacacctggccattggaccataatctaaattgaaaatagatcatataacattgtgcagttcaaacagaatattcaaatggaaagggtagaatcaagtcaatatataatggtagttacagtggagaaaacagcatttgacagcacgtagaaagaaccatgaacttagttcttgaacttcatgtgtttattctaaaaacaaacaattttgtttcattttttagtcttctaaaattttgatttgaggattcattgtggtggtgtagtaactacatagcatgtcttcataaaacaagaaaaactatggccttccttaaaagaaacctaatctttgctgtccctgctatgctctcttttctaaagtgttatatttgatctgtcttctgaactctagtcctttgactatataactatgaagaaaaaatatgctacttcttagggaaaatatgatgtaaaataatcttgattttgtgattattggtct

SEQ ID NO: 5854 - DNA, 619 bp, Homo sapiens
gggcttctgtccccagagagcagattcgcacaaacccggaagcgggtcgcgtggagtgacggtcccaccgcggggatatctcttccaaatgcatgatgaaggagttctcatccacagcgcaaggcaatacagaagtgatccacacagggacattgcaaagacatgaaagtcatcacattagagatttttgcttccaggaaattgagaaagatattcataactttgagtttcagtggcaagaagaggaaaggaatggtcacgaagcacccatgacagaaatcaaagagttgactggtagtacagaccgacatgatcaaaggcatgctggaaacaagcctattaaagatcagcttggatccagctttcattcgcatctgcctgaactccacatatttcagcctgaatggaaaattggtaatcaagttgagaagtctatcatcaatgcctccttaattttgacatcccaaagaatttcttgtagtcccaaaacccgtatttctaataactatgggaataattccctccattcttcattacccatacaaaaattgggaagtacacatgagagaaaaatctttccaatgtaatgagagtggcaaatcctttaattatagctaac

SEQ ID NO: 5855 - DNA, 646 bp, Homo sapiens
gaaattaggtgcttcctctatattcattactcatgcgtgtttattaaaatttagttatataaatgagaacttgacacattaacaagtagttatatggctgttaactcaatttctctttaaagacttgagaaaataagggaaaaatgaaagttaaaaagaagaccctatttattgaactacagccatttcattctcatgaaaatggtatgttcatggccaatgcagttaatttactggtgaacaaaagtagtccaaactagttcattgaaataatatagtgcaaatccactgacctcagaaataacctcagaaacttatatctaagcttaaaaggggccgttgtctgggcgcggtggctcatgcctgtaatcccagcactttgggaggccaaggcgggtggatcgcctgaggtcaggtgtttgagactagcctggccaacatagtgaaaccctatctctactaaaaatacaaagaaacttgctgggcgtggtggtgggcacctataatcccagctactcgggaggctgaggcaggagaatcgcctgaacctgggaggcagaggttgcagtgagccgagattgtaccattccactccagcctgggcaacaagagtgaaactccgtcccaaaaaaaaaaaaaaaaaaaa

SEQ ID NO: 5856 - DNA, 501 bp, Homo sapiens
gtcgcggtggagctatgtcaactctcggcattgacagcagaacttgcagacgcacgtgcatcggagggcaagggcgcctttatcatctcccccacggggcaggaagccccccagcctcccagcgagaagaaagaaaagctgcttcagttcctcacccagcctcatccatgtctccccagatcatcaagcagagcatcgtggagctcaagctgcaggcggaggacagcttcgtgctgaaggtggtgcagctggaggagctgctgcaggtccgccactccgtgttcatcgtcgggaatgcgggcagcggcaaatctcaggtgtgtcacccgctccagggaccttgcagggatctggcatggtgggggagggctggggcgaagggtcggccctccatcactccccgccaccccggagaccccaacccagtacatcctgggagccctccggcctgagtcatgggccagggaggaagctgggggccgaggaggagggggaggagct

SEQ ID NO: 5857 - DNA, 463 bp, Homo sapiens
attgatcaaccgatatctttttgatgactcctagatgcaagggaggttaagaagctgattattttttatctaagttaaaaaagagagagagagaaagaaaaactcagggcaagaagtggagaataactgggtaggcaagtggtggcatcatccacaccaggtgttctgatgctacatcatttatgttttacatcccaccaaattgctcaccatacacacatggaggtgtctatccttgattggactgccctttatgttaatcactgaggtctctttggatatgtgaattgaacccaggatcaatgtgaagtcaccttcaatttaatggaagccggtagcaaaggaaggataaatttgctgggcattactttttcttttctgactcctgatgggctaagtagagaaacttttcattttaagctgatggaagcagcaaaaaatgaaaataaggatgaggtgtgag

SEQ ID NO: 5858 - DNA, 206 bp, Homo sapiens
atttttttttctttaaggctagacagcctaatatgccaaacaaatgtatactgtcaggccatttacctggcgatgccggagccctctgggcacatgcatatatttatatcagtacatgagatacatgctgaaatgttattgcctacacgctttaactctttactctcaaaattcagttcttgaatgtaaaataaaaagaccttaca

SEQ ID NO: 5859 - DNA, 467 bp, Homo sapiens
cataatgatcttatgcttccagaatcttacatatagaaaaataatgacttataatcctggggtcatataagtaaaaccacttgattattttaattcaccaaaacatgataataaatcttaacttttcttatgtatgttagcatggagtataaaaaatctgaagaccactacagagctttgcttatttaattttacataaaaatattttcctttctgttaaattgatttattttaggtgagcacgttattattattttgacccagagcttcaagagaaaaagagcacttgcagttagaatgcattctggatggacagtgtggcatattcagaagcaatgagtaacatgtacaagctgtgaggtaggtagatcttgaaacaagtcattgagaaaaacaagtttaaaatacaaacacaaaattcctattacacaagaacacaagcaaataaaaggattatatgtatgtgt

SEQ ID NO: 5860 - DNA, 431 bp, Homo sapiens
ttgaagcgattctcctgcctcagcctcctgggtagctgggattacaggcgtgcgccaccatgcctggctaatttttgtatttttactagaggcagagtttcaccatgttggccaggctggtctcaaatggacctcaggtgatctgcctgcctcagactcccaaaatgctgggattacaggcgtgagccaccgcgcccagccacccatgccctctactaaacagctcttggagatggtagaattacggtgctggaaaggaccttggttcaactttgtcattttagcaataaggaaatgggggactagaggtggtaggatcagccctcattatataatcgcccatacatcgtaatctttactgtttaaatgagtaaaggcaaatataaagaaagtaattttttttttttttttttaaaaaggagtctcgtttt

SEQ ID NO: 5861 - DNA, 558 bp, Homo sapiens
gtggcaggagctagtgaggggaggtgaggaatccacactgcagacagatactcactttggaaaagactgaggacacatgaaggccatcaaacagggaaactagaaactatatttcttgagggcaagggggcactgaactcagaagtctaagaggctttggcgcagcctatttacatgatttcagagattaccttatcttgttgacctttctatctttcatccttttccccactttggtccactatctctctatcatcaccatgaccactagtgctaccacctcttaattcatggtttacttcccttttgcctcaccccctactcttttctgccaggcctcttgtataacccctcccaacacctttgggggtatctctgaatcactttcttggtgctcgaatttattgccatccttcttcagtgaaattatgagacggcataaaatgaggacagggaaggccttgttgaattcaaacacatagatccacatcccagcttccagaactagagaagtttctcttttccagctcttcccgtgggcatcaaatctcagctgca

SEQ ID NO: 5862 - DNA, 331 bp, Homo sapiens
taccttttgaaggtacctcactcacccagctttaagtgaccagagattccacggcttcatttcagtagctaaaacatccagaagcctctattaagatgcaaatacttttcacaggctcctttgaagatggaagataaataaatacataaataaataaaaataaattttttaaaagatgcaaatacctcctgggaaaggtaacaagccatatcatgtaattgtgctcaattctctgtaagagaaactcttcagtttcagatactcttaggtcttaggaattgaaagctaagatccagaggataaaaggaggaaggaaaatttgatcaagagg

SEQ ID NO: 5863 - DNA, 173 bp, Homo sapiens
tcattattaccctcactgtcaacccaacacaggcatgctcataaggaaaggttaaaaaaagtaaaaggaactcggcaaatcttaccccgcctgtttaccaaaaaaaaaaaaaaaaaaaaaaaaaaggggggccttttttttcgtaaaccccaacttgaaaaaaacctttgggg

SEQ ID NO: 5864 - DNA, 603 bp, Homo sapiens
tgtttcctctttttcattacctcaggatatgaagatgaagtgtgtgtttcgtttttgttttgaaagagggaactctcataggtgtatcaacaaagctctaagaaattttggaatcttgctgattgaagaagtaacagacttgattcttcaaataaaatgggaattcattacttcacatatatgtatgtgtgtgtatatatatatatgtatgtttgtatgtatgcgaaaaaataatattctttttatcctagctcttgagaaaggtaatgggaaacgaatggtatttccctagtaaaccatggagaatgaatagacaaatggtaacacgctgtttcatcccaaaccgtaaactgggccatgtaactttacataaagtggatgcagctgtttcttccctgtccaactagtctgctttttctgtggaatttttgctttcttttcttgtactcccttaagactcaactgtaaaagaaaacaaatctttgtccaattagagcattagatgggaattttgaaggaattatctgaagcccagcgataaaatatcagaagctctgaaactcaaaattggtataatataatgggtaaaaactctgcctctgg

SEQ ID NO: 5865 - DNA, 583 bp, Homo sapiens
gattcacctggcctggcagagacagaaggtttcccataggagccagtacttgagggaaaaacaggcatcacacacacatttggaacagggagtggaagtggaatggaaagagaaggccttcgaagcagagggaagaatacatgcaaatgtacagaggcgcagatgagtgtgtggttagaaagcaggttggggcgggggctggtgggagatcagctgaagaagcaggcagaggaggcagaaactgaatcattcaagctttcgtcagcagactggtatggaatgtgggctctgtgccaagcaatgggttgtggtagatactcgtttttctcccacctcactggcgatgcgttcccagtctccttttctgtctcccccacttgtatctcttttccatctactttttcttcttagctatctctttcagtctcatagatttaaatatcctgatggctcttaatctgatttttcaatattgacctctcctcagagatcccaaattgaatgaatatctaattgcctaccgatactgctacttgggtgtctaatattcattgtgtacttaacatatctaaaagcgagctct

SEQ ID NO: 5866 - DNA, 556 bp, Homo sapiens
agcagtgacgagagaaccactgggctaagtgtactcatgtatcaaggtactccctcccccaaatacaaaatcttttgagtcagtcttcacttaggaccctaaatctgaattgtttagctgctcccactagttattgctatgtaccacagggaaatactcacagcacttgaggtttacagaatcaggtcttagaaataacacttccctttaggaaagagcttcttaatcttttttgagatcacagatcactttgagaatctgattttaaaatatatttatttactcaacattttcatataatctcaaggagtttgactttctgaagccaatccatagacctctaggtgaccatggacctcaaattaagaacttctttattaggtgctaacagtggatatatttaagttcataaagtttagtagtttactcagaatgattcctaataatttttttaatgatgataggctgtgcagcactataaatgctaaataaacatgacctctaaagtaatactaataaatacagtttagaagaagtgaatattatagcaagtctc

SEQ ID NO: 5867 - DNA, 551 bp, Homo sapiens
aacaacagacactggggcctactacagggtgcagggtaggggaagggtgagaattgagaaactacctatccgatactatgcttattacttggatgacgaaataatttgtacaccaaaccctgcagcacacaatttacacacatagcaaatctgcacacgtacccctgaacctaaaagttaaaaaaagaattataaaaagtacctaaacatattaatatgtgaagaaatttaattgtaaatactccctgaaatagcatatttgctataataaataatttcaacagcaacaaaaaagaaaggtagctggaaaattctaaaatattggagattaaacaacctacttctaaacaatacaagaaagggtcaaagaaggaaacacaagaaaaattttaaaataatagaactaaatgaaaatgaaacattaacttatcaaaattttggggaaaccgcaaaagcagtacttagaggacaatttgtagcattaaatacacatattagaaaagaagaaaaatctgattaaatccaaatcatgaagaataaaatagataata

SEQ ID NO: 5868 - DNA, 524 bp, Homo sapiens
atctgtttaggagggaaacagaggatagcagaacctgctaagtgacaccgccaacatgcagtttgccaaattcaaactatagaacaaatgacccagtttctttaacagataaataacaagagaaaagggccagtggcagaagacttgttagagagattttaaaaaccttaccaggcaaatgcaatgtgtggatcttgtttgaaccataattagcacaataatggttctaatacaaagttcagctgctaaaagatatttttaaaggcatttgagggaatttgaatttgaaacagatactagatgatattttaaaattctttcctgagaaatggtctatgaagaaaaattattgtttattttgttaggtatgatattgtgagagattttgttagaaatacaaactgatgtattttgggatgaaatgatatgatacagaaggaacatagatttaataagattggcaaaatgttgataatttggttgatgttgaaattgggtggtgagtacatgaatgtcattatgct

SEQ ID NO: 5869 - DNA, 608 bp, Homo sapiens
gtttatgtaacaggttcttagatagcatttactgtattccaggtgttctaagctgttcatgaatattaactctgtaatcctttataacaatcctgttcagtattgctacctccatttttttccaggtggagaaacaaataggccactcagctaggtagtgctttagccactgaggtatactgctttttcatgttctttttttctgacccaactgtttctctaactttaaacattaatttttccccagctcaccattcagcattcgtaatctcttatctagcgcttccacaaaaaggattacctagctggcatgcatttctttgtctgatgtctctttgggtactacattatcatttctggccaggtgcagtggctcacacctgtaatcccagcaccttgggaggccgaggtgggtggatcacctgaggtcaggagctcaagaccagcctggccaacatggtgaaaccccatctttactgaaaatacaaaaattagccaggcatggtagtgcacgcgggtaatcccagcaacttgggaggctgaggctggagaatcacttgaacctgggaggtacaggttgcagtgagccaagatcatgccattgcact

SEQ ID NO: 5870 - DNA, 433 bp, Homo sapiens
tcccaccaaaaagcaatccttggcacaagaacaagaacaaagcagagagactggcaaacgataattcatgtctgtttcctactctcctcctacatccacagcccagacatctctaaaaaaaaatatgggcacttggctgggcgcggtggctcatgcctgtaatcccagcactttgggaggccaaggcaggcagatcacgaagtcaggagatcgagaccatcctggctaacatggtgaaaccctgtgtctactaaaaatacaaaaaattagtcgggcgtggtggcaggtgcctgaagtcccagctgctcgggaggccgaggcaggagaatggcatgaacccgggaggcagagcttgcagtgagccgagatcacgccactgcactccagcctgggtaacagagcaagactctgtctcaaaaaaaaaaaaaaaaaa

SEQ ID NO: 5871 - DNA, 576 bp, Homo sapiens
gccgggattacagatgcctgccaccatgcctggctaaatttttacttttagtagagacggggtttcactatgttggtcagtctggtctcaaattcctgacctcaggagatccgcccgccttggcctcccaaaatgctgggattagaggcgtgagccactgtgcccgcccaggactccaccattttacaataaaaaataacattaccatatcatcaaataatatgtgattatttgatacttaaaaatagtacagtatgcagattactggaatagtgaaaattgataacgcaatccctagtagaaagaaaatccgaaagagttctgtataccggctttcagtacatttaaatatatatatgtttgaacaattcatctttatccctaatacaataacttttcaaaagctaatttataaatgtcagtttgtacagatacaaactgtataatatccaatataatcagatattctcagaatatacagattaaatatacagaaataaatgtatggttattgcctgatcataattccttagggaaggcaataattcacaatttatgtacccacagtggcagtgt

SEQ ID NO: 5872 - DNA, 608 bp, Homo sapiens
aactgaaatggttcttccaagaggatttggggacatttattaattcttatttcaaaatgttaaatgtttggcccactatcttaagctattaattccaaacagcacaataaactgaagacactaaacgttaaaaagggaaacatatcagttatatattttcctaagtattgtttatattatagatgattgaaagttttagttaaattagcctgtaaacaccttcaacttgatagtcacccttatcatttaaaattgttttataaaaaatgcattaggagttattcagaaaaaccccaaagcacgtcagacttattactctattttatggattagaaaatttaccaaaagctggaaaatgagttgccttaagttacatattggttcaatggcagaataagctactaaactcaaaccctcagggattgcttatttcattattcaacaaaatctccttttgcttacagttttcatggaataaatttaaatagtgtaacctattagatacatattagtttaaggaaatattcactgtcagaataaacactaatttatttaaagaatgaataaataaatcactgcattgaaatagttatcaaggaataggattc

SEQ ID NO: 5873 - DNA, 599 bp, Homo sapiens
gagatgtagaaacatcatgggtttagattaacgtattcttggcattgtttcctttttcaaagaaaaagaagggatgtcagtggtatctgatatcaaataatttaaccagaagggtagctaagctaaagcaaagtgagtccaggctcatttttcaacaggctaaaatgaagaaaaggaaagctttagatatcattcattttgatccaaagcatgttgaccaaacacctattaagtactttgaaatgttcctgttataatatgggctgcaaatacatgggtattgaatgactttattagtgaaggcattgtgttgtagacaaatatgaatgaaggctggtatttgcctttaagagtttaattgggcttttgtattgggggtgcaggcaggcacgtgcaaaatatttgggctactagctccagcttaaggcagaacatgatatagtggaggcagagggtactatgaagttacaacaggcagaaaaatgtgttttgatcaagaggtttgataatgaaggaacaggcttttgatgtccaaattgaatttcattaaagcttcagataaatattctcctggaatagtttgagggtcattctgacat

SEQ ID NO: 5874 - DNA, 605 bp, Homo sapiens
tggggaggaagaccatctgccagcagaaaattactgtgaactggactcttaagaccaaataccccacttcccacttccctggggtaattcctgtgtaaatgaaggaaacactctaggcttcttgagggctgtgtttcaaatctcttttggaaaacagtggatcatatgtaaatagagtgaatctaaaaattgaaccaatcaagcattaaaagggttcccccaatggatagttctatagaaagaatttaatatgtacagataaagtgttggaaaagatgacaatgcaaagcgggagcaatgaggcaaccctactgatagtcacagcagaaatctcccactgccctaaggtttgaggaaaaatggaaggatttgtgtgagcctgggagcagcactggctggcagaagctaaacttgcggtgggactgccaggtgagtgcagaagacagaaaagcagcggccttgctgagcatgaaaagccactgctggaaaagagagggagtcggggagaaattcacattgtccttccttcttcaatctcccattctcctaggagacacattgaccaaaactagccagaagtcaggaagcctggaaaatgtagtttg

SEQ ID NO: 5875 - DNA, 580 bp, Homo sapiens
tacatccagttttacaatgcttctcatatataaccaatgtggtttctgcactatcgaccatggagacacatatgtgtcctgtactgctggatttgccaagaagtgtttttgatgaatgtgtggaatgccctttttccaaagtcaaacatctggttttggcaccaattatcaggccagctctatgctcagcacaaaaatggaatgtactggatttgcttgggtagaagttgctcacacaatccacatttccaaatgccaaggcttttgcaaaattcatttgagttgattttaggtgtgaggtgaaatcaagaacaatactgcttcttgcctagcctagatttttgctagttctgccattccatattaatcattatgttgcaagtttctgtgttacaagggaaggccttattgaccagtggcatcaaatagagactaatcagtaatttccacatcaataatcaaggagggtacctgcagatttttaaaattgcagcagaagctgagtttaacagtttttattattactaacctatgttcagatgtcaaaatggaaaaggcaattttgagttttttttcttat

SEQ ID NO: 5876 - DNA, 496 bp, Homo sapiens
aaggacaccaatcatgaacagcatatgaaaaatcgatgacagttgtgccaaagggcctaatgagagcgcctactgggaggacctggggaaagtttctgaggcaggggaggcttgggatgtaaggattgttctaggtggggaccctaacgcaggccagcataggtgggaagacgaggaaggggaacagagcatgagatgaggctgaggtgtgttcaggatcagacagtgctggtcttgagaagctgtgggaagaagtgtgactttatcctgagtgcaggggttgatgggtgttgtagaaagctgatgctggcctcatagagaatggtgaggaggaaggcaagtcgagaggcagggagcagtgtggagctattggcctcggccagggagagccgatggttgcttggactagggctgaggcaccagggattgagagaggtgagagatccacaggatgtatagcaggaggggtctgcaaaattctgtgattaattgcacg

SEQ ID NO: 5877 - DNA, 429 bp, Homo sapiens
gcattatattttgtcttattttacaggtctctccacctcttttgtcctaagtttccctcccacaaaaatatcagctcattttttttagtgttactattgactgataagtgacagaaaaatagtaggtgtgaaatttttgcttcagcaaattatctgttacatttgcacagcagcctagtgagcacgatggagaaatattggctgaatcaaagtatagctcgttggtttgcactttggttgaacgagggaacatgtgtcagagagcagattgttggttccattagtatcaccttagaacctgctgcggaagcactcattcattggcccagccctgaataactcatacatcactggcttgtacccgagtatgataatacaagtctcagatttggagctgacaagatgctaagaggtaaagcatacgtatga

SEQ ID NO: 5878 - DNA, 599 bp, Homo sapiens
gatctgtgatctattcctgctcctgtgtatgtgcacgacgtacgaatgagtcatagttttcaagaatgaatgtgggtgtcatcaacagtgatctgtggtctatcatttcataaatagattgttccaaaagtactttaggcacaactgagcacagatagtctttggatggctttaatccaagcccatttcaatatgcctctttttattgtccacacttctttctactaccactaacttaaataattcatataatcagctagaagagttttcaatgaaaactcatctttgaacacaagaaataaggactgagaagtggtgaacaacttgcaactgaggtattctgaaaatagtcctaacataatgtcccccaggtgtagccatatatggtaatttggtaaatcaacaatgaagtcttatgcaacagtgagaatctaagtatcaagcactagatgaggtactgggcaagagaaatacaaaagagaacactgctttaccccatcctcaaggagatctcagggacagaaatgtcagcatctacctcaatacaatgacagctgagtgactatctcaagtgagaactgaagaacgtatcacaggag

SEQ ID NO: 5879 - DNA, 566 bp, Homo sapiens
ctttgccacccaggctgtagtgcagtggcacaatctcggctcacagcaacctccacctcctgggttcaagcgattctcttgcctcagcctcctgagtagctaggattactggtgcacaccaccatgcccagataatttgtatgtttttagtagagatgggggcttcaccatgttggtcaagctggtctcgaactcctgacctcaagtgatcaacctgcctcagcctcccaaagtgatgggattacaggcatgagccaccttgcccagccttcttcttaaatgttttaaagctgtcttaggatctatcccctgttatgaaaaatggagaaaataatactacttagtttttttagaatccttttgaggattaaatgacatatgtgttataattagaatgaatttcattttcacaaagggaaaatgcaatataattataagaaaaattccctgtaaaaatattttattgattattggtcaaaaacaataaaggctcaatgtagaaaaagaaaagcatgggaaaatataactaagcaatatattcatttgtaacacataacatagtattt

SEQ ID NO: 5880 - DNA, 539 bp, Homo sapiens
actagtaagaagcaacactaagactggtttagttccattcttaaccatgaaactgtggtggtttgtagagtggaatcttggcattcatgaggaatacgccaaaatgaaaccaaaatacctactaagaaaacaaacttacctccctcttaaaattttgtaaaactgcaggaaaagatattttgaaaaaaataataaaccaattaacatgagaggcattgggtacattgggtaaatacccagacaccagagtcagactacctaggttcaaatctcagctctctaccatctaccagctatgtgaccttagcaaactgtttaaacctctgagcctcagtgtcttcattttcaaaatgggttgttttggccgggcgtgttggctcacacctgtaatcccagcactttgggaggctgaggcaggcggatcacttgaggtcaggagatcgtgaccagcctggccaatatggtgaaaccccatctgtactaaaaatacaaaaattagctgggcgtggtggcacacacctgtataatcccagctactt

SEQ ID NO: 5881 - DNA, 590 bp, Homo sapiens
aagaatttcctcagagctgggatttacttcaaactctctcctaagccaaaccttactgaccaaagggacaagtccccaggccagctctctacccttctttgttcagagctagagccagagatcaatatgggcttccccactccctgccccttctaccttacccaaaactaaaaggaagaatcaacactgtgtgtctctctgagaagtctccctcaggagataaaagacccaaagggctgacccctaagctaacagcttacatttaaggaagaaaaacaatctgcctgcacttttcttagaatttagggaaaaaaaggagaatttaaaattcaatttcatgtatcagagttctccagaatacagccaagtggaaagaacttagtcccaaatgaaaaagttgagcagaaattcttctctcactcgttttgccggcttggaggtcagactggaggtgtcctgaactagaaccagagcataggttctgacccaagaaggacactgtctacttcccaggcatccctccttggctgggaggagaggggaggatgagtccattggaagctgagaattgtggaagctggggatgggag

SEQ ID NO: 5882 - DNA, 608 bp, Homo sapiens
ctgggatggctggcagcaacctgtgcacccctcaggccgctgcaggaccccagtccctctgagggtcaaggcctgtgtcacagtggtcactggaagccaggcccgccttcctgggctgatctgtgggggaggccaccctcctggacaggatggcaaactggcaacagacccccgaggagtgagcacagctgcaggccctcgccccagaaggacaatgctgatccccgcgcatgctccggtgctgcgtgtcccgagttctggtatcgcgcattatgtggtgaagacagaggtgcagtccctccaggaagagagaaataaataagcagatgttgtttccaacagcctccaattgggagacagatgcccagtggccagagcacaggagactgtcagggccgacctgatggtgtaatttatttaaaatgctacaaaaatacagccaggtgcagtggctcatgcctgtaatcccagcactttgggaggccgaggcgaatgaatcacaaggtcagttccagaccagcctggccaagatggtgaaaccccatctctattaaaaatacagaaattagcccgggcgtggtggcgggcgcctgtaatcccagctactc

SEQ ID NO: 5883 - DNA, 606 bp, Homo sapiens
aatacaaagaatgaggagtccaggggagaccacaggtgaaatatattccgacgaagaatgagaaatctatagcataatttgaattgttgaaaacaaggaaagaaatatcaaaggatgccatttataggataagaataggaggtaattgaaaattcgattttattagggcagaggctaacagtttgaaaccagtataaagcactgggtgtctgggagaaaaggaaaaggaaaggaagttgggaaggacctcaggcctaagaatgcacaaatgtcatttatgtggaaattgcaccttcaattttaataccaactgatatctgatgtttcacagatatattattattaattagagatgttacaaaattctgcctaagcaaacccatctctccagatcaggtgtatatttctagccaaattctactcctatgtgaaaggatacaaagcaaaataaaataaaatcaagaaatacgaatacccatgtcaagtctcatattctttatctttggccatttcgtctacattttccacaattttttaacctctctgttcatgatctatttttaaaagtataaaattcttcaatgcccagtttgttgacacatgtaa

SEQ ID NO: 5884 - DNA, 599 bp, Homo sapiens
caattcccaatgtgatgatattcagaggtgcggccaactgaggggtaattaggtcatgagaatagatcgcttacaaatgggagtagtgcccttataagaagagacacaagaggaatgatctatttctctgccatgtaggacacagccagaaggcagcttacagccagaaaaagaggtctcaccaagtgcccaaccatgctggctcccagatgtcagacttctaacctccatatctgtgagaaataaatgttggctttttgtccttcccattctacagtatatttgaacccttagttaacataaccctctctcttagttcaaagtacccaggagatacatgtcgtaacaccaagtaagccatggagtcaaaggaggaaaggggattttagcatagatagtgtaaacaaggagttgattattgccagttttggtactaatatcatgtgcagcaatgggtctgaagtttgtcccattaacctctcctaagtgtttcctcaaggagagaaacctacgggagccttggaggagctggctgtaaaaatgccctcttcagatctccttcagcagagggaagaggatgaagtttctatgaaattcat

SEQ ID NO: 5885 - DNA, 524 bp, Homo sapiens
aggagtgatcagtgtccattagcatgaagtccctagacttgacctaactgctgctttgaccttagagcctggaggcaaggagagttctgatgagccttaggaatgctaccaaaataagtaacatattggaactctctctctctgagcactctctgatactttccaagttgaagagtggtaccaacccacatttggcattaaccattttatattatcaactctttaaaacctcagcatatatgtacaatgataacacacacatgttcatgccatatatttttatatttattagattatatatgcaaatatactctaagaatattcacttagagacaaaatgcctgtgtataaaaatgtcagtctaacctgaggattaagtaattttttattgttaaaaatgtatatatttttattatacatgtatgagagagaaaaagagagatagagaacatggaggagggaagaaaggagaggaaaagagagagagcttatgtgctgactacatttatgcaaatacaatcaaa

SEQ ID NO: 5886 - DNA, 528 bp, Homo sapiens
ttgttttgtttttgttgttgttgttttactctgaaactcgtctacagacctagtgctcatattgtcttctcatatacagggtgagctgtgggcatactcagtgatgctatgtacctgcaggtgtatacagtggggccagattatgcccatgctgaagctagaaaatctccagctttggatgggaaggttgaacgagacagtgaggggaaatagattcgatatccagtcatgctgactgccatggaaaagctggtggccaggaaagtctgcgtagctttcaaggtagaggagggcccagggaggttgtgaaatgagggagaaaggaaggaacaggggtccgggaagagtaactgtcttgttctcatctttcttcttttccttgcagcaaacagtttgtggatttgaccttcttcgtgccaatggtcattcctttgtgtgtgatgtcaatggctttagttttgtcaagaactctatgaaatactacgatgactgtgccaagattctggggtaagagatatcacaaatatg

SEQ ID NO: 5887 - DNA, 607 bp, Homo sapiens
gggtggcacacctccccctgtgtccctgtgggagaactttcttcacagcaggggtttataaaatcaatttcatgggaaacagcatttaaaaagatgcaatagaaaatatcacaatacattgcaagtattaaagttttgtcagactgttttatttatgtgtgtgtgcctgtgtgtgtgcatggacacctggagcacattgcaacacaacgtgtgtttctttctctgtatcacactgctcatttagaagcccaagcccagtggaagggtagatgtgctgggctgttgggtgtacacacttgtagctttgttagatattgccaaattgctctccaaagtggctgcacagtttcttcagcctcacttttcatgaaatggttgacaatattagactggaattttttccagtctaatagtgaatgatcttagtttcatttgcattctgctcttttgcaacgtattggacgtttgggctgcttctccctgatttgcctatccatctcctttgctgagctttttactgggttgctgtgttttcctgaaagtacttttaagagatactaatcttaaaaatcttaatcttaggccgggcgcggtggctcacgcctgt

SEQ ID NO: 5888 - DNA, 578 bp, Homo sapiens
ccctatctccaaagaaggtcacatcctgagattctggttaggacttcagtcttggaattttgggtaacacaattcagctggtgacactgacacagcctggggctgcccagttttcccagaaggggcagcaggaatgggtcaaaaacccatcactcatcaagaaaaaccagttcatgtgttgaggaaccgtcttgtctgccgtccttcagaatgagtgcgcagttgttttgctgttttcttgggaaccagctgtggaacactgcgcttccctttcctttcttttcaagaaccttggtgcccacctggcctcctggaggacacctttgtgcagaggctgccagagatggaacatagagatgggggaggggagcaggtgatgctggcccctgttgaaagaaagtgggcaagagcacgggtagttatttctcctcttacagaaagggcttgctgagttaggcttcatgtggcattgtgttcttctgaacgtcacttaaggcatacatgaagcgtgtgcacatgacacagcccagtggagccagggagtgactcagcctgctgcccaacacccactgcaagtt

SEQ ID NO: 5889 - DNA, 475 bp, Homo sapiens
atcttggtggctaaagaaagaagtgatggctgtaatcgtgagctttccttactctctatttgtcatgaaaaaagacacagaaaaaagtgaaagtcagcctagaaatgaagagacacgtcattctacagactgatgggaaaaatagggctggggaaagatggaagtcaagagactccaacccctttccatatacttctttgccttctttaataggaaatactgtttcataatttcaaaagtaataccagctcaatgtgggaaatttgagagataaagagaactatgaagaaaaaatttagccagatgctgtggctcacacctgtaatcccagcactttgggaggacgaggtgggtggatcacttgagcccagcagttcaagaccagcctaggtaacatgataaaaccctatctgtataaaaatacaaaaattagccaggcattggtggtacatgcctataatcccagctactcggg

SEQ ID NO: 5890 - DNA, 605 bp, Homo sapiens
catcctaacctgggaaacgagtttctctcacccactttacaacccattgtaatcacattagaaacccaagcgtagaagttttcaaacttagagtcgtgtgccattacactgagcatatgggtgatgttatttgtattttattttatttttacaagtcaaacacaatccttttttttttaagtagggattctataatcagtaaaccaggcacatctttatttgaaaaatgaattggtttttaagacaaatcctccttcatttgatacagcatgcagaaaaaaaataccgataaaaaaaccatgttattttaaagtctattatcatcctggagacaagaaaaactattttctgctttcagactttgtttcttgttttcaaaagagttttcacgcttatcagtgggtgcgctcatattaccacagtaccttaagttcctttgataacttagttttctctccgaaagcaacaacaaaatacgtaattttgttctgtccatagaaagcaatgacatgacacactcctctcacctagcctccccaaaaagaaaaacatccagtcattttggatgtcttgagtggaaaggtttgggtttaaatttggagccg

SEQ ID NO: 5891 - DNA, 606 bp, Homo sapiens
tcctttatatcacagctaaaatgccattcctggccaggcacagtggctcatgcctataatcccagcactttgggaggccaaggcaggtggatcacctgaggtcaggagtttgagacctgcctggccaacatgccaaaaccccatctctactaaaaatacaaaaattagccaggcatggtggtgcatgcctttaatcctagctactcaggaggatgaagtaggagaatcacttgaacctgggaggcagaagttgtagttagccgagatcatacctctatactccacccgggcaacagagagagactccttctcaaaaaataaaataaaatgaaatgtcattaccttagggaagccttcactgtatcctacacaggtaaggttcctagttatggccccattacatgttctgatagattcccaaacacctccttccaaaccatgtaacacaattgtaattcattgtttgtgtagctgtctatttaggaactatcatgctagacaattagctcttgaaaccaaagattaaatctgtcattgtcacttctgtatttatattaggacagtttctggcacatactgagatcctaataaatttatggaatgaat

SEQ ID NO: 5892 - DNA, 606 bp, Homo sapiens
cttagatttatgcactgcctaagcctgttgcttatcacctctcagcctggagtctagcccactcttcgcctccgcctcataggaaagggccagtgcctgcagggagagctgtttcttgacctttgcctttatgtaattttgttattaaaatcaaagcaagcaaacaaacaaaaaaaaccctgcccctgtcccatagcccctgagccgttgaagtcagtgttcttattcagagttctgtgatcccctctcatgtgcctagtcttcaagggccttttaatctaaaagcgaaggttagatgctagctaattaatcaaaagataaactctttagaaaagtttagctatcactgccatgtctgggggaaaaacaaaactaaacaaaactttaaatctagcatatgatatggggctgctctgttaagaagtcctcaccagcaggccgggcactgtgattcacgcctataatcccagcactttgggaggccgaggtgggtggatcacctgaggtcaagagctcgagaccagcgtggccaacatggtgaaaccccgtctctactaaaaatacaaaaattagccaggcatggtggcatgtgcctgtaatcccagc

SEQ ID NO: 5893 - DNA, 555 bp, Homo sapiens
gaaattactgtcttttcttacaataataaatttatgacattttttcttaaatcgtgtttgtatttttttacattttgatacctaaagtatcactgaacattcctcgggtgcaaaaatatttgcataattttttttatagttatgactatagatttttcattaagtttttgttttgtttggtgaggtttttttgttttgttttttattttatatttttttagaaaagttgttttacacagcaaatgaagtgccaatgcagacaaatgtaaccaacatgaagctggccaatagaattcaacaaactgctaaggtcattaatataatttgttttggcactgctacgtttcctagtgctactctgagtagtttgctgggcgcatcaatttgttttcagctattgtgaaatcggatatcttggctttcatccaaaacaccctctccatttgcatatctttgttatcatttcaggttctcagaacatactgtggactatcacaccatctgcaccaagatcctcacatccaaacacaaattaaaaatgaaactgtaaaattt

SEQ ID NO: 5894 - DNA, 560 bp, Homo sapiens
actcacacacacatagacacacacctttgctcatactcaaacattcacacgcagaaacatacttacgctccccaaaataagaacacatgcaccccttttccgaacacttgctgtgccaaactttcaactctggattgagttttggggtgattaaacacatgaaactgaaactatccaaataaactcttttggcagttattgaaagtcttttgaagtaaaccagaatgcttctacagtcaatgtttccatactgaatcagtccctgtcacagtgatattatgtttatttttatgctggaatgtagattttttctttctttgcaccagctctgcaaagataaaaataagaggtaatgaagcagaatgctatgggtttgaggacctcttccctggagaatgtgtaggctctaattctttttacaatctctttataataagattggcctgctacttcatagcagtaattgcagccttcttctattcgtcagaaagagaaactattttctcgcctctgtgaatcagtaatccttcttaatacttagtgactccctcagtcctctt

SEQ ID NO: 5895 - DNA, 581 bp, Homo sapiens
acacacctgggtacatgtgaaatgataaaataacttttttcagcaaacattaagacatctggtttcagtttggaattatatgttggcaaacattgtttaaaaaatggattttttaaagtttaaaaaaagaactttcagtttctagaaagtttttataatgtggaatttgtatggcaaagaatttgtataaaaagctgaatgggaaggattgctaaaggtaagctcatgcagcaggcactcttcacctactttctcttctacctaactcaacaatttgatgggaaaactgccaattcagtttgtacttctaacttttttgttctttgaatttagaaagtgacagaatgtaaaaatttagtatatagggcctgctactatatatttagctatttttccaatattttgcaatcatgttattctccttacattataccaaagtatttctatcacaaatcttttttatcagtgtctcagaatggactagagaaatgactcatggcataataaaaaatctcttttcaaaagcataaatgatgatgcctatttagtaacacaaaatcgttcttacagattgaaatatt

SEQ ID NO: 5896 - DNA, 561 bp, Homo sapiens
gggggccagtaaagtatttccttggtggtcgggactaaggaaaaagccacaggactgtaaagcattccttggttaggacataccaaggagagagaaaccacaggggcggtaagcattccttagttgggactagggaaagaaagccgcagcagggccgtgaagtattccttagtcgggatgtcttgcaggttaaaaagaggtgagaaatacccatgggggtggggcttgaacctcagaaagaggtgagaaatccccatgggggggctgaacttcagaaacaggtgagaaatccccatgaggtgggcaggatgggggagttaaacctcagaaaaaagtgagaaatccccatggtggggggcgctgaacctcagaaacaggtgaggaatcccaatgtggggggttgaacctcagaaagaggtgagaaagccacgtggaggggttgaacctcagaaagaggtgagaaatccccatgagggggggttgaacctcagaaagaggtgagaaatccccatgaggggggatggaacctcagaaagaggtgagaagtccccatgagggggg

SEQ ID NO: 5897 - DNA, 495 bp, Homo sapiens
aaggacaccaatcatgaacagcatatgaaaaatcgatgacagttgtgccaaagggcctaatgagagcgcctactgggaggacctggggaaagtttctgaggcaggggaggcttgggatgtaaggattgttctaggtggggaccctaacgcaggccagcataggtgggaagacgaggaaggggaacagagcatgagatgaggctgaggtgtgttcaggatcagacagtgctggtcttgagaagctgtgggaagaagtgtgactttatcctgagtgcaggggttgatgggtgttgtagaaagctgatgctggcctcatagagaatggtgaggaggaaggcaagtcgagaggcagggagcagtgtggagctattggcctcggccagggagagccgatggttgcttggactagggctgaggcaccagggattgagagaggtgagagatccacaggatgtatagcaggaggggtctgcaaaattctgtgattaattgcac

SEQ ID NO: 5898 - DNA, 590 bp, Homo sapiens
gaaaaacccagcccagctttggtggttttttttagtccaacttagagtataagccatacctcagaatttgagaatttgttccctactcagcaaatgggcaggttgtttgtgctcttacgccaattgttcctttaggagatccttgggaagagaagggcccagaagcagtagtgttaacctctgggcacttcccattttcctccataccaaaggccagtcttcagaggcaaagcaggcagatgttgggggagggccacacagaacttgtaaaagggaccttaaaagatctggaaaggcaccatgagtgttcagtgcttgtttctctagtctgaaaagtggaagccattttctaaaaccatgaaagaataatttttgctagggctctgtttccaatccaaaagaatcatgttttccaatcgctgatgtcaggattagacaaaaggtttgttgcctagaccctgatcaattcatacttaatactactgaatccttattatggtttaggtacaattttaaggctacaatatatattatctcttttaatcccatttaatttactcatcagtccagtatgatacgcattagtatgt

SEQ ID NO: 5899 - DNA, 602 bp, Homo sapiens
gactttcaggacggtcttagtgagataggagctgggccagggtagggaagtgttctgggtgacaacaaggtcccccacgaggaactctgggagagagagagacacgggagggtgagtcttggagattcagggatcaggaaaccaggtagagacttcatgggcagctgtcaaagccaccacttccctgcccggaccttctggctgtcagagctaggcagggagaggggacacccccctacaactccccaaagacccctgaacacagaggcatctgcaccctccccctgctgcatgaacactgctgaacaccggaggactctgtcacattcactgttttctctcctgtcccctctcacaaggaccctgaactttctggcacaaaagatgcccaaggtcagaaggaaatgcatggctgggtgcggtggctcacacctgtaatcccagcactttgggaggccgaggttggtggatcacaaggtcaagagttcaagaccagcctggccaagatggtgaaaccccgtcactactaaaaacacaaaaattagccaggtgtggtggcacacacctgtagtcacagctatttgggaggctgagggaggaga

SEQ ID NO: 5900 - DNA, 581 bp, Homo sapiens
gcgacaccttaaccctgcttacctctcctctcccaaaagaaacatattggctcacaaaatgtacaagtgttggggctctagactctatgggatccatgcaactaagcaatattatcaggatttaggctccctctgtatctccactcttatcatcatcatattaccacccctataggccagaacctcttcatgtaatggcctccagatgttctaggcaaacatcattttaaatctgtcaaagggagagattcttatcaatagtactggcacaaatctaggatttgagccgcattcatcttgatttggttacatgatgagtcctgaagtagttactgggttcatgtctggttaccagcccacccctagagcaagaggtaaaatcagcaccacttgagatatcttaaactgagaatttagaaggggttgttcctcagaaactattggaatgcccttactaggataggaactgaattctggtgagacaaaatccacagatgtcccttaggcctctttttatgtcagtcctacggcatattgtgagatggatgtattggcggaagaaatcatgctactttgacagc

SEQ ID NO: 5901 - DNA, 539 bp, Homo sapiens
tgtatgccagattctgttctaggtacttaatatatggtacattaacccattttaacttcataaactgtggcacaaagaagctaagtcacttggtttagacaaggtcacacagttagtaagtggcaaaatcaagattcaaacctagtcttctggctactctctctcaagctccatagctagatataggaaatatgggatcctactagggagggaaaaggagggcgtgaatcctaggtgttacagaatgaatattactgtccccctctcaaattcatatgttgaaaccctaacacccagtgtggctgtgtttggagatgaggcctctaaggaagtaattaaagttaaatgaggtcataagggtggagccctgatcagataggactagtatgcttttaagaagagacaccaggctgggcagtggctcacgcctatattcccaacactttgggaggccaaggcagaaggattgcttgagcccaagagttcaaaaccagcctgggaaacatagtgagacctcatctctaaaaaataaaaaatta

SEQ ID NO: 5902 - DNA, 584 bp, Homo sapiens
gtcagatacattcaagaaaaagaacgacagatactgacatttggaggagtactccatcccagcgtaaatgcaggtacactgtctcatcgccctctgctgaaagcccatcaactagctagccctttcccatacccagaattgccagtgagctttttagggtaaaactgttaaataggaactgtcattcaaaagacatttgaggaacgtgtctgatttaaaaggcagtgatggtaacaaaatatacaaataggaaagccaatcttggaggaaacagatgatactgcataagaaaatttcccaaatgcccaagtctataattaatattgtcagagaggaaagtaatcccatgtctgaaatgaaagcaggatattattgaaaggaatattgagagaacagaaaagaactcttagaaattaaaaaatatgatagcagaaattaaaataattaaatgcaaaaatgagaatattaagttgaataaatgtctctgaaagttcaaccaaaagacaatgagattgataataagagaaaagattaattagaaatgtctaacctctgtctagtggtcggtcccattaaaagagagc

SEQ ID NO: 5903 - DNA, 538 bp, Homo sapiens
agatgttattttcatcactgtgccaaggggtaactgaataatcatttggtctagccactacttgtaggttagcgaacttctgaaagaaacatgcacttattagaccatgctgaaagatataaatactccttaattattagcaaagcttgtgttccaatcctggcagaaaggtctctgttaataaactcagtgtgtgttttaactccagaatgctgaaaaaaatagacatttttggtcagtctgaactcaaaccaaatatcttgccacctgtaggcagacccaagaaaaaagaaatctcattgctgagaaaataaaattttacattaaagattttttaatgaatataaatgtttaaatattattacatttgaagattacatagcacaaaaaagttgtgaaactttacatataaacaggaaagcgtgaggaagaaagaagggcaggggaaaaacaccgtaacacaccatgaccaaccctacaaaagtgtggtcagatcaaggtcatagaatgagatcaatctgattagcaattcctcctc

SEQ ID NO: 5904 - DNA, 561 bp, Homo sapiens
attgaacaaaactagtggcttcaaactttggcaatccaacacacatgcacacacacatacgcacacaactgaaaagtgtcatgaaacaacatttatccttagtcatgaactctgatattttctataactttttaaatgctggttgtggctcactaatttgctttcatgatttagtaaaaggtctcaacctgcagtttgaaaagctgtggaataaaccacatggccaccaaaggcagaactagaacagtcttcaaaccactcagctccttcttcatgggttattattaaatcagaaagggcctaagtttcacttcttgctgtaaaagaaactgtacattccgtatcctcctcctttgccctccacagttcacgtgagcactagaaattcagagaacacccaggaaccagtgggcacttcctatgtatgcaactcatgtcactgttgcccaatctaaggtgctgccattcaacatcagggagagtcctgtggcctgttctcttagtttcgtcttccttattttgaggcccagcaaccgtcatcattcactgtacctttggagc

SEQ ID NO: 5905 - DNA, 528 bp, Homo sapiens
aataaatggagtctaagtaagaccttgagcctttagtgggttagttgtcagcttttggacagatccctttaccttcttacccttagctttctcccctatgaaacagggccatgatcttgtaaaaggatgaaaatgacatgagtaattgcaaataattataaacatcagggaaaattcaatctacatctactacgccttccattccttttcaactatgttatacatttcttttaactttagctattcatggtgcaagggatcttccagatatctagaaagctaattcaaagactgacattagaaaactttacagaaaaaaaagattaaagagttgcaggcatgggtgcaaagagcaacatagctgctaaaggaagcttgaaatctttgtctagtcctggggacccagctggagttgtcaggaatcagcagagcaggtgttcagctgaggtttggaagaattcttagcccattgaaatactttatgggccgggcatgatggctcacacctgtaatcccagcactttggga

SEQ ID NO: 5906 - DNA, 549 bp, Homo sapiens
cagaagggttctctcaggcaggaatgctcacgggtcaaagaaagcacaaggtcacttttatttctgaggcaccaggaacaataagaacaaaagagtctacatgttgtctttcctagtagacaatgagttccaggtgggcaaaggtgcagtaaaacacctagcacttttgtagatactcaaataatgtttgccgaccaaatggatgaatagaattaaaaaagtaagaagatcaaattatcaaaacacagtgatgcactgccaggtttgatcaaatacatgtgagaaaacttgtgaaatacagattcacagtggcatcttttaaaaacaattgttctgattctctaacctgagttgttatcattagtttgatgccataattttaccacaaacctgctgtggataactcaagtaatgcatattttaataatggtttacttcagccagctgtggataactcaagtaatgcatattttaataattgtttacttcagccagctgtgcccagtttatagcctagaatggtcttcattctgacaaaatctgatgaca

SEQ ID NO: 5907 - DNA, 634 bp, Homo sapiens
atctttatagggtaaagtagtggttttgttggccatggaaaagaaggaaaagaaaacaattgaagaaaatggattattttgttttatttttaattttctaaccgaataagtaaataaatgtgttctcccttaggagaaaagcagtaatttctcccttttctctgggagtcagttaaacctcattttacgttaaaaaaaatagtattttttatgttacaccatatgttttctgaagtaattccacatatctgattttatgcttatagcaaaaatttgtatttatgcatatgtaaatttagctgctaagtgttgtgtttagcatgtgacatacacaggtgataaaacacggcttcagtcttcaaagacaatggaaagaaaataggtacacaaataatttctctatgagacactatgtaatcaggccagaatagtctctatttgatagacagacgttaaagaatttgaactcaaatcatgggctttgttaaaactaacactgtagtttactaactcctagctcaggactctagggattacactatataatcatatcatgatagtaaagactgcccaacatgtcatataaacagggaatgaaagctgagtgtagtggctcatgcctataatcccagca

SEQ ID NO: 5908 - DNA, 514 bp, Homo sapiens
ggttattaaaaatttaattttaaagaaggcatccaggaaaaaaaaagtatataaatgctacttagaacccagattgcccaatttaataagctcatcagtatgtcaacagatggctggcactgctcgttaccatcatctattttcaactggaggcacatgcactgcagtggctcagctggtgtcttctgcctccctcatttaacagagggaatagcacaatctagaagaagcatcagacacaggatatactgaattgggagaatcccccaaactccagatctcttgattgtatttgtaattattgtaagagcaagtatctaaaccatggtataaatggccaacacttcaaggactggtatgattagaagagtttcagcttcctctcattctgtgatatggacatgatattagcaccttcattaaacaggcagtgtgtcattaggttgctttttgtaccccaatttcctcatctgtaaatagggatacaacagtacttacctcacttacatcacat

SEQ ID NO: 5909 - DNA, 579 bp, Homo sapiens
ggactgtataagcatgtgtgtgtttagtattacggttctttgttttccatattttctgcattgattagtattacttttataaacaacttttttaaaactaatttaaaaattgaggctgggtacagtagctcaggcctataatccccaaagaaaaaaaagaaaaaggagaaggagaaggaaaaagagctggaatggtgatgcagtttcatggaactgtgtgggctccagctgttttgccctctagaagggggctttgagaggcctaggcaggaggatcacttgaagccaggagttcaaaaacagcctgagcaacacagtgagaccacaactccacacacacacacgcacacacacacacacacacacacacaaattttaattggccagttttagtggcatgcacccatagttcttgctactcaggaggctgaggtgggaggatttcttgagccctcttttgaggtttcaatgagctatcattgtacgactgcactccaacttgagcgacagagggagaccctatctctaaataaaatacaataacaataaaaaagtatacttaatacctatccagtcttg

SEQ ID NO: 5910 - DNA, 400 bp, Homo sapiens
ataataataatttaaaaattaaaacaaacaaaacaaatcaaaatatgttaggaatcccagtcaatggggtgaaaggaaacaactaaaaacatatatattagaaaaaaaactaaatgtacatgaaccagaggctcattaaattatgggagtacacacgaagcatttctcaggtatttgaaagaggtaaagttatatcactaaaacacatagtacttttaacttgaagagttaaggatgtacatacatgtgtatgactatttctggggagaatacacgtgagactagaaatggtgcttgcttctagagagcagagccgggaatgtggtgaagagaatgattttgactttcattttatgtttcctcgatattttcccatgtgcatatgctatttataaaactt

SEQ ID NO: 5911 - DNA, 581 bp, Homo sapiens
ttgaccagtgacgatgagctttttttcttgtgtttgttggccgcataaatgtcttcttttaagaagtgtctgttcatatgcttcacccactttttgatgaggttgtttttttttcttgtaaatttgtttgtttcttgtagattctggatattaaccctttgtcagatagatagattgcaaaaattttctctcattctgtaggttgactgtttactctgatgacagaaactgttttttctacaaaacctagcttatttctctgtcaagttcccctattcatttccctacaccagcatcaccaacaataacaacttaagagctacccctaagaacatggatatcaagactgcatgaagatttatgaattctaaagagcatttcttgacactgaagccagctaaactaactttgcagaaatgctcaaaatgttcgtaaattttaatttataccaaaatttcagtttcaaaatgccacctaatcttcttgaatgagttatgtgttatacaactttattccaatttccatgtgactctgcatcttgttcatttctaattcatacatttgtgatatatggcttcata

SEQ ID NO: 5912 - DNA, 635 bp, Homo sapiens
agatttactggggatacacacagtaataagagaagctactattactgaacggcacaactaaatatgcttgaaaattctttgaaataaatcaggcctgcccaaacttagtgcttttcaaacccgaccatgattcagaattggccatggtgctttttaaaaatgtagatgcctggattccaccccaaatgtactaaatcagaatcttacagggggctacccagtgactgtacatttaacaagtcacctcaaatccccaaattattctgacgcacatgcaggctttagaaccactattataagtcccgtcagtgtcatggtgtgaattctcagcaatgtaattcctataaaatgaatttgtttaaattaagaaataccaagacattttgattggtgataataaaaccatcttcatgttgtataggtattaaagcacctttcaacatccaagaaaatgaactgtcattcttagaaatttggggattaaaccatgtgctctgaagccttctttataaacatgacactatgatgcagtatctccctgtaatggttctatacttgtaacagataagaaaattccctggctcactcgtaatagctagctgctgtctgacaactgtcaaattttctcattgctg

SEQ ID NO: 5913 - DNA, 616 bp, Homo sapiens
gaggttgtaacccttcaggatgtggaagtctgcctcagttccaagtcttcaccattcgcagaccctcatttcctggtttccactagcctttagaaaatgaatttttaggctacagagactggtagatgcccccaagggcaagcacagagtcagctttaatttactaccttttcaaattctttccttttttaacctctgaaatttctataattactattgttaagattagccttgcaaataagggtaaataaaataattcctgagaatatagaaatgagggtaaatcataaatggcagacagcattctgtttccatctctccagataagggttcttaggggctgctgttttagacaggggtaccaaacatccaaatccatggggaatatatcacacttgcttgtcaattttttttaattgacagtaattgtatctattatacggggtatactgtgatgttttcatatagttttactttgtggaatgattaagtcatgctaattaaaaaatctagcacctcacatacttatattttgttgcggtgaaaatatttaatatctaatcttttaacagttttgaaatatacaggccaggcccagtggctcacacctgtacta

SEQ ID NO: 5914 - DNA, 650 bp, Homo sapiens
caaagcctgccaagcagggtagaggacacgccatccataaccttcaatgcaacaacttgcaactcagtataaccacctaacatccggccttctcagcatttttcacaccatgacatacacagcgcatgaaatctgtacagcaaactgagataaaccactaaggctgctctcagcaggaggagactgccctgagggttccaggtgccccaggccccaccagcctccagggaaattacagagttccacctagacacccgccccaatgcttccagcaagcctggggcctggaatagcatagtggccaggatgctcagtcgaacttgttgcaaaaatgagccaactgtgactcctgaacataaaatccaagatcctggtacaatctatttctacactactggcaccatctcaatctatttgcccagtcacttaataaagataaccagtaggtggataagtgccttcagttcagggcctagaaggggtgggcatggctggctagctgggaaatgcaggttgcacaaaaatcagtaaagatactcacactactttatagctgtattaatgctttatggtttataaaaagcttttattgcattatacatcaattgataataagatataatctggaacaggcagagcaaaaaaaaaaa

SEQ ID NO: 5915 - DNA, 577 bp, Homo sapiens
tgcattgtgaagaatctgaaagcacaaacaggggcatagagcaaggcttctttcagtcaacgaattttgaggaaggcaaaatgcacagagtattgcagaggaactccaggaagatgctgtttttcaaattcaaaggggagaagatggtgtctattggtggtgagaacttaagttccaccacagaagactaaactctgttaaagaatcaatgagtaacaactcctgggtttctgaacatagggctgaattgatagaagtggtgttgcagaattattctaaccataacatgatagattcagctgtaagccaggagattctctgtttgcatatttgacctgaggtaatgagaacatggattaagcttgtggcaataaaaccagaaaggaaggagcagagggatctgagacatgctaccaagaatcagagctagagattcaaatttggctaaatatatgccaagtggtaggtgaaaccatgtaagagacactcttcaaggaaatgggtgttgagagagaatagctgaggactgagtctttggggattccaacagttaatgggaggaggaaagaaggggagc

SEQ ID NO: 5916 - DNA, 523 bp, Homo sapiens
cctttgatgatgattttattcataaatgtttgttttcttctccaccagtactgggacagaaatttgcatataattggcactccattaaaattgcttgcattatttcagcctagggtaaatacatggtagctgtaataaaacctctcaaccacaacataatccgaatagaaccaaccttcagagatagaggaagatgatcccaattgtctagtgattgcaaaattatattaaccttaggtaaagtccattgtgtataaattatggtagaagcttagtgcaggagaatgaacaatagttttagtgtcagaaaatgtgagttaaattcccagcttaccttattactggacctatgacttgaggaagttttgtgggttttctctcttttgtttgggaaaatgtgagggggatgcataatcacatttgggaaactgtggatattcttagaacagaaaaaaatagattagtgaggttttgaatctttccacttatcttggtaaggattatatgccaaagactagttatt

SEQ ID NO: 5917 - DNA, 710 bp, Homo sapiens
tttattctttgaaataaataaattatgacttccaatggcctcatcaaactgccaaagtgaaattgtggttacaagaaaataatggaagcttgtttaaaattaaacattgtgtattttttagatctggagagcctcaataggttccctatcctttgtaccacaatataacacacaggcattttctaaatcaaagcttttactatgtaagtggtaaaataaatcaagcaatttaccaatatagcaaaagttattaaatctttgttgaagaaaacgtcacatcaattagaaacttcctttgtaaacatggcaccatcagggcaacaatttactaacaccaaataaagattttcgggagtgttgagtggatttacaaatagtgttcctccaaaagaaaatatcactttctgagcctgacaacactcagccaagtggcagctgttctataaccctagtcatatgaaaataatagaattgagatgatgagctatctaaggtagaaatagtattaatgtgacatttttataaagagagatacaacaaactatcagaataaagagaacaggcaacaacaaatcaaattcttctgtcttgactgtaagatgaatgttggtgaatcaatctttttaaactgtcttttgaaaagaattacattatcagatgcatttgttacactacattgtgttacactgatgaactattaatatagcata

SEQ ID NO: 5918 - DNA, 603 bp, Homo sapiens
gaaggaccctctcaggagcgcccacccatgaccaccatcacaaccccaaacctgtctcctttccctgctttctcaagtcatttttggaccaactgtgtagacaccctgctctccccataaacctcattacatgagtaagaatccatttcacacaatcttggaggtgtggcattagcattagcagtctcaacactgaaccaaattgtatgcaaactgacccctacaatgggcattgtgagcaggattatccagatgttggctgccaccttcagggaattgctgttttagctttgctttgctcactggctctgtgccccatgacaagcctgaactttcagctcagctgctttgtgctgcttttattgagttcggctgaggctctttgagagatttctctgacctaggtcagtaatttagataatattttggtatttaagaacaggaatatggactcagatcccttttaatgtctccctgagtcatgcatctcagtccagacatattgctgtgtcttttataatttaaaaaaccaaattctgtgtgtatactttcactgatatgtttacagaaaagttatttatctattgaaacttcttcacaagc

SEQ ID NO: 5919 - DNA, 588 bp, Homo sapiens
atgttctgtgaggcatgtcccacgctctctcaccacctgcgggccacgggtcacagctcccatttcacagaggagcaaacaggatcacagaggacggaatgagcccaggcgctggctgtggccctggcaggagactgggtctgacgctggcctccacccccagaagataatgagaaggccccaaaaccatctacccctgagagggaacctcctttcctgggaactggaaagcgagtctttccagactggccacgtgccatgtgctgtggcacactgggctgaagcgtagatatcatttctcacactcagcccggcacctctggcgtcacctggataacagccactgctctccagagctgacaacagggtgcccacgacccctggccacgtcaagtcactgtcaaatccagccaactcatatccagggaagatagggagatgcagaggcagccttcgattcaatgacatgtcactgtcctggataaaacgtgttaaatttcatcaaaaatgtcaaactaggctgggcatggtggctcacatctgtaatctcagcactttgggaggccgaggtgggcggaccacgaactc

SEQ ID NO: 5920 - DNA, 451 bp, Homo sapiens
cttgtatacagagagggcttaattcttgccttgggtcatggctcgtgggacagcatgatcagactgacttctgggagtcctggggccagaaggaagtgctccaaactcctaggggctggttttgaacaacctctgcttggccagcagatgttgggtagggaaggaagtgggtttcctggcttgtttctgacagaaagaagcaggttctgctttgaggagacaaacagtagtctcactttctaggttcccgtgacctctgacctcagcctaccttctacaccacactgacctgatgaggctgtatcctggcctcaggggataaaattgtcccctgagagaagcttggagccagagacaactttgcagactgcctgttccaaatacatttgtgtctcatctgaggaactcagagagtggaaagtgatcaggaggtcacagggcccgatggtca

SEQ ID NO: 5921 - DNA, 457 bp, Homo sapiens
gcctgagcccaaggtctgttgaggcctatccctctctccagggtgtgtgctcaccatgcccttcctggtgtccctgggatccaagaaggtcatggacaggtatatgggccactgcccaagagtttgagagtgaagtgtatatgtaagttactaagaacacgctcagcttctggcacaaatccactcattcactcatcaaacactcggcgcctgctccacgctcagcccttctgcactcctgactttgctgattctcgtacaacccaaccataactccatgtgactgtgagtggggcttccagagcctgggaggtttgccaagtcctcctgctaagtggctgagctaggatttgaactgagatctgtctcaccacaaggcatgtggtgatggctccagagtctctgtcttcctggagtctggcatcttgtgagggatgtttgagccttatggaaactc

SEQ ID NO: 5922 - DNA, 588 bp, Homo sapiens
atctgtttaggagggaaacagaggatagcagaacctgctaagtgacaccgccaacatgcagtttgccaaattcaaactatagaacaaatgacccagtttctttaacagataaataacaagagaaaagggccagtggcagaagacttgttagagagattttaaaaaccttaccaggcaaatgcaatgtgtggatcttgtttgaaccataattagcacaataatggttctaatacaaagttcagctgctaaaagatatttttaaaggcatttgagggaatttgaatttgaaacagatactagatgatattttaaaattctttcctgagaaatggtctatgaagaaaaattattgtttattttgttaggtatgatattgtgagagattttgttagaaatacaaactgatgtattttgggatgaaatgatatgatacagaaggaacatagatttaataagattggcaaaatgttgataatttggttgatgttgaaattgggtggtgagtacatgaatgtcattatgctgttgtttgtattttcatgtatgttctaaaatgaccataataaaagcttttttaatttatagtag

SEQ ID NO: 5923 - DNA, 437 bp, Homo sapiens
aagcaatcaaggtcattgaatgctgctggatgagtacaagatgctgtggaaacttagaagcaggtctcacctggtctgagtgattgagctgagccagtgacatgtagtaaacctgcaggagaagcaggggtatgccaagtaagagaaggcagaggggccgggcgtggtggcttacgcctgtaatcccagcactttgggaggctgaggcaggcggatcatgaggttaggagatcgagaccatcctggctaacatggtgaaaccccatctctactaaaaatacaaaaaaattagcctggtgtagtggcgggtgcctggagtcccagctactcgggaggctgaggcaggagaatggcgtgaagctgggagacagagcttgcagtgagccaagatcgtgccactgcactccagcctggacggctgagcgagactctgtctc

SEQ ID NO: 5924 - DNA, 578 bp, Homo sapiens
tttaaaattaaaattaggtggtttcattctattgcttatgatcaaataaaacatttctctggctttttcttgcacatagacataatccaagtattttttcacatgacctacaaatctctgaatgatttggtcttttccacttctccagcatcatcgtctacaatcattactacatccctttctctctgcactgacagcttcttccaagcttttttctgcctccagccctttgaattttctcttttcttttcttgatcttgacatagctgagtctttttctttattaaaattgtagacacagcagcatttcctcaaagaagtctttcttcactgcatgaatttgcaacctttccctcctccatgctactgatacacactctgtttctttttaattctgttttatttactgaacaacatagccacaatccaactctgtatgtaggtaattgtgtaggaataatttatataccaaatttagcaaagttagctctcagaagaggtgtgcgattatgaagggatttttgttatttttttaaaaatctatatgcttttgaacggcaatagagcataatcttcta

SEQ ID NO: 5925 - DNA, 591 bp, Homo sapiens
gtgggtgaatgaatccttctacatgcccattttttttctgaacatttgaggtctctctttccttatttctctttcccttctttctttcctgcatctctctctttctctcccttcttctttctttctctttattttctccccttccttccctctcttcttccttttttcttttctttccttctttgtttcattccatcctttcttccttccttcttttttttccctttttttctttttcttattacagcagttttacaataagcattcttatagctgtcttgatacttgacagagagaaagcatagaatgcattccatgggagtgaaattgttggatcacagctgatgcaaatattcaggctcaaagaataatgacaggttatttctactcatatttatacttcctccagcaatttgttgactcatctcctctctgattgttggatttgtctggttttgtaattgttgtgggattatcatcagtgggaataaaatcaggccaatagtttttaaatgctaatttgtatttcccttagaactaataaagttaaacatcttttcatgagcttgtttgcaacatgtttcctcttct

SEQ ID NO: 5926 - DNA, 604 bp, Homo sapiens
cttcaacaatgtaactgctgaaaatttcttacagacacacacacacacacacacacacacacacacacatcacacatatatattaatttacatatcatttgttcacaaatatttggctttaaaaaattctaatgagcaaagtttttatttgtgatgtaacaaaaacactgaagctgaggaagagttacttctcttgactaagcacatgctgactgatgtaatacaagcacagtttaaagtggaggaattcaggtatggcaagttttaagtttcaaggaatgagtccagatgagttgtttgtcttggtagcattttttttctcatatttgaagcttagttctagatgagttaaatgtttttgcaaaggaagcaaattgatttggatcacacagataagctggtttgtcaatgggatcaatcaatggttttcaaaaacagaagagaaaaatacaattagggtaataaaaggagcactcatttgccaaatcaaaagagaaattagtttcagctgaatgttagtttttagctctctgggaattactgtcagtgaggggcaccgagtactcttcggtagcacagctaaactgcttgatgttaataaacc

SEQ ID NO: 5927 - DNA, 614 bp, Homo sapiens
ggacagggagagtgtctggggttgtccagtgggctcaatatagtcacagtcagggaatgttctctggccggaggcaggagagacatggcagaagactagaggctgagactgcccaacccaccattgctggagggggccacttggaaagcatgagaaggaagggggacccagtcctacagctgcaaggaataattgagccaactgtgcataagcttgaaggcctccagggtgaacccagcacctcagacactggccccatgagactgagcagaggacccagctgggcctggctgaactcaggcatctgacttagagaattgtgagataatcagtggtatttaaactgccaagcctgtggtgatttgttgtcatggaagcaatagaaaactaatacaacagggctgggagcgcctgtaatcctagcactttgggaggtgggcggatcaccttatgtcaggagttcaagatcagcctggccaacatggtgaaacctagtctctactaaaaatacaaaattacaaaatacaaaaattagctgggcgtggtggcaggtgcctataatcccagctactcgggaggctgaggcaggagaatcacttgaacctgggcagcag

SEQ ID NO: 5928 - DNA, 524 bp, Homo sapiens
tgagacacttgttgattcctccagagcctttccctcctcctttgctagctgagtcctgattttgtttatgtttcaggttgagctcctttggtctcagggaaggtgggtccatgtctgatctagatcaaggaatgtgacccagctctgaccaaaaagatgtaatagggagtgagcaagtggaaaaggcctttcctatctgatcagaggaatgttcatgatgagaaactctaggctctttgcagccctttccctctagcttctgaatgcctgtgtgatgacagggactgtggcagatttcttaagaccttggagggaagaccaaaaacgtctagagattccaacccagatccctgacatcactagccttccagcaccagcaaccacccactccagccttcttgatgtgtgagagaagtaacctccaattgtttaaggcactgtattacttgctgcaaatagcattcatgacttattgcaagtttgtggaattgcaagggatgatgctgagacgtcaagcaggtgcc

SEQ ID NO: 5929 - DNA, 416 bp, Homo sapiens
catggatcccatgtttatctcatactctctctagggtcctgaaaagctgaagaaagtgaatgctgacattttaggagagtttagtagatggtgcaccagcaacagctgactgccactggctatactgtgggaccactctttgatttcttcatgcttcagtgtgctcatttgtaacatggtatggtttggtcagactatgaggctctttcctgctctatgattctgggattctaacatatcctcctttgcttctgtaacctgaatttcaccagattgcaacaaaatgtgggtatgaaaagaacacaatatcatttttggagtattctggcaaaaagtgtttaacctggatctaatcatgaggaaataatcaggcaaattccaattgggagagtctataaccaactggcctgcactct

SEQ ID NO: 5930 - DNA, 609 bp, Homo sapiens
gtgtgtgtgtatgtgtaaaacagacatcaaaggtttcaggaattattggtcctgtcaaaattctgagtagctcagctcatatttactcatgcaccttactcttccagctcgtctgcacttcttccttctggttcttatgttggcaggtgtattagtaagggttccctggagggacataactaataggatattatatatataaaggggagtttattaagtattaactaacatgatcataaggtcccataataggctatttgcaagcttgaggatcaaggagggccagtcccagtctcaaaactgaagaacttggagtccagtgtttgatggcaggaagcatccagcacgggagaaagatgtaggctgggaggctaggccagtcttgccttttcacgtttttctgtctgcttagccagacagaaaattagccagcagctgattagattgtgaccaccagattaagggtgggtctgccttccccagtccactgactcaaatgttaatctcctttggcaacaccctcgtagacacacccaggatcaatactttgcattcttcaatccaatcaagttgacattcagtattaaccatcacagcagggcaagagaa

SEQ ID NO: 5931 - DNA, 609 bp, Homo sapiens
tgggtggggatgagatgatgacagcagattcaaggagaaaagtgacaagagcctgtgttctggcagcagcagaggtgatggagggattgttaggaaccggtcaccccatctgctggggtgaggggagagtgtgttggagcaggaggaagctaggatgatgccagagactggacacaaggcacagtgagaagtgactagcctttcatgggacgaaggcactggaggaggaagaacgtgagggtggtgtgtggtgggtggtgataatggtgtgggcaaaacaagcccggtctttcaagcattgagtctgtggcttctgggagacatctgggtagagctctgcaggaagtcatttcatatattctccctccctccctccatttccttctttccttcatccatctttctttccttccttctttcagtgaagatttattaaggcttaacatatactaaacatatgctaaaattcaaacgtaccctgataaaaaagtgagatgttgtttctgcgtaatattcaatgttggatctcaggagaaaagtaaagatcagaaatatacatttggaggtcctcagtgtgtctgcatgtgtgtctgtatagatatatacaca

SEQ ID NO: 5932 - DNA, 603 bp, Homo sapiens
gggcactggatttgggcagccccgcgtttgaatgccgcctctcccatttcccagtcgggtaatgctgggcaagttaacttcctgtctgatccttcatttcttcacttgcagaatggagagcatatgcctcaccttgagggctgttggaggaatggaggtttgggtgctcagtatttattagcccttatactacattaatttggtgttaggcaaacagaggaaagccttcttaaaaaacagctttaccaagataaaattcatatactataaaatttgccccggtgaaattaaaaccacaatgatatagataccaccttacttctgcaagaatggccataattaaaaagtcaaaaaacaataaatgttggcttggatgtggtgaaaaggggacactttcccactgctagcgggaatgtaagttagtacagccactatggaaaacagtattgagattccttaaagaactaaaaggagaactaccattccatccagcaatcccactgcttggtatctacccaaaggaaaagaagtcattatacgaaaaagacacatgcacacacatgtttatagcagcacagcttacaactgcaaggatatggaacc

SEQ ID NO: 5933 - DNA, 601 bp, Homo sapiens
ttgatctgcagtgggacctggaattttatacattgagcatagtgccaggcaatgcttatgatcagatgatactaattaacccctggcatcatatgatcttcactgtgattggagttagaagatttagcttcatatcctgccttctcctatcaacacacacacatacacatatacacacacacgtgcacaggcatgccaaattggctgttacttatctcacttgtattatttatatctttttactcataaaaagactttgggctgggtgtggtggctcatgcctgtaatcccagcactttgggaggctgaggcgggtggatcatgaggtcaggagatcgagatcatcctggctaacatggtgaaactctgtctctactaaaaatacaaaaaattagttgggcgtggttgtgggtgcctgttgtcccagctactcgggaggctgaggcaggagaatggcgtgaacccgggaggcagagcttgcagtaagccgagatcgtgctactgcactccagcctgggtgacagagcgagactccgtccaaacaaacaaaaaagactttgaagttgatctggcttctacatttgtcatttttctaaaactc

SEQ ID NO: 5934 - DNA, 468 bp, Homo sapiens
gaagtgcaactcgaacttggtcggggcgcggatcccgagagggaaagtcataacaaccgcacgagggagttcgactggcgaactggaaggccacgcctcctcccgcctgccccctcagccctgtggctgggggcagagctcagatttattatctaggatagatttggatgaactaatgaaaaaagatgaaccgcctcttgattttcctgataccctggaaggatttgaatatgcttttaatgaaaatcatcacgaagtatgtatatgagctcctggaaaaggattgtaatttgaaaaaaagtatctattccagtagatgccactgagagtgaaccaaagagttttatctttatgagtgaggatgctttgacaaatccacagaaactgatggttttaattcatggtagtggtgttgtcagggcagggcagtgggctagaagacttattataaatgaagatctggacagt

SEQ ID NO: 5935 - DNA, 591 bp, Homo sapiens
taccatttgattttaagacttactctaaagctacaataaagaaaaccacatgctattgttgtaaggatttatagaccaatcaaactgaagtccagaaataaacccaaatatacatggtcaattgattttcaataaagatgccaaggtaattcagtgggaacatgatagtttttcaatgtattctgctagaactattggatatccatttgcaaagtaaacccttacttcatactgcatacaaaaattagcagagcacagatctgcatttaagcaaaaaccataaaactaatagaagaaaacacaggacctgtgttaaacaaagcttccttaggaaagaaaatgaaatttattaaattggattgtagaaaaattaagaacttgcttttcagaagacactgttaattagatgaaaattcattctacagactgggagaaaacatctgacaaatgtcttgcaatgctcatgtttgcaatatttctctgcctggtttctgttatttcctttacctggtgtgcccttttccctggtcttggcatgaagagctcttatttctcttggagaatggataaacttggatattagatcatttt

SEQ ID NO: 5936 - DNA, 596 bp, Homo sapiens
tggcgtgaaaccaggacctaatctacctcccgccattgtttcctaagtggtccccagtgacagttcaccttttcaatcacaagtcacaaaggaagggtgggtcagacaaatacaggttgcacggaaaatgtgggtgaaaaaacagtatgggagcccattgggaatgcatttttttgtagagtatttccacaagagcaggactcaaggataaatgttccctacagaaatattactgcagcattcctgttcatgtttccccaccacataggatgagcatctaacttgcacaaaacccattcaggggattcattgctcatcaccgaaccagggcaatgctgggttgaccatgtaaagagtcttcgttccagctgggcgcggtggctcacgtctgtaatcccagcactttgggaggccgaggcaggtggattacctgaggtcaggagtccgaaaccggcctggccaaaatggtgaaaccccatctctactaaaaataaaaaaattagccgggcatggtggcacacgcctgtaatcccagctactcgggaggctgaggcaggagaattgcttgaacccgggaagcaaagatagcagtgagc

SEQ ID NO: 5937 - DNA, 549 bp, Homo sapiens
agtctgcaggggataccaaagacctcagttgggcttaacccaagatgtggatacaacagtcatagaggaagacaagtgaaccttaatccttactgcctacttgactacttcaccctcttgttatcatgggagccaaggagcctcctgggaatacttcataccagcctgaaactgaacttcagacatacaccacctggcatgtcacatggcctgggcagagttaggtaaacaggtcctcaaaagtctgttagaaaaagtcggggttgggccaggcacggtggctcgtgcctgtaatcctagcactttgggaggtcaaggcgggtggatcatctgaggtcaggagtttgagaccagcctggccaacatggtgaaaccccgtctctactaaaaatacaaaaaattagttgggcatcgtggtagtcacctgtaatcccagctactcgggaggccaaggcagaagaatcgcttgaagccgggaggtggaggttgcaatgagctgagatcacgccattgcacttcaacctgggcaacaagagtgaaactttgtct

SEQ ID NO: 5938 - DNA, 504 bp, Homo sapiens
tataccttataacaaatgttgaaactaaatttcactacttgtaatctcttctgccaaattaggaggtaccaaattgaatttagttatagaaaaaatataattattgtctaaagagctctttcaattatttctcaggttatcttgattaaaataatttttcataaaatgtctgcacgaaaccctaaaccacacttactcctttgggactaccgatcccttgaagatagctataaatgctattttaaacacatatgcacatgcataaacacacagacacacactcatacaattgcacgcacaatttcatatagttttacagagttaattttatatgttcatagttccagttatgaacctcccctaggaaattcgctatgaactcttatgaaccatggattccaggttaaggaatgtatacctgaccttaatatataccttcatagaaaaataatatcagctcatcagtatagacaattaggttattttaaaaaaaccagttgcttg

SEQ ID NO: 5939 - DNA, 552 bp, Homo sapiens
gagtatctgggaaggacacaacccatctcagctgagtccaaacttctgatccactagatactgcaacatagcaaatgatatcttacatttatcttgctactaaatctgcaatatcctattgtaatgcagcaaacaatgctaatgcaacttttacctgcatgggtaaaatactgaacattactataatctttattcataattcaattgaaaaatgttaacgactttcattctttactcagattattctatttcttaaaacaataattatttcaaaactaaattagtatgcattcttaaaactatttttctcaagtcagagaaaagaatccaagaaaaaaaataactataccactcttgtgtcagtgcatatgttccatgaaatagcagaagttattacaaatatactattatttaattctcataatatcactgccaggtaggtcttataagggccactaggtggctatgtcatcattatgtaaaattccacctgttttcagaatgcaagtttgtaaccattcaattataaagttcatcctctacaccaagagg

SEQ ID NO: 5940 - DNA, 525 bp, Homo sapiens
tcagatgtaaagtgcttgtgtactctcgtttttaattatgtccctcaaataaaaaacagtaacacaaaggtatgcacttaaggcttgctgtttgactaacatgtctacaaatggcacaagaaagctattagcctgaaggtttgctccaaaaattgccacagtaaatatgaagtaaaaaaacctcaagatttctaaattaattatgaatcaattaaggtcttttttatctttaaaaaaagtgttttggacaggcgtggtggctcatacctgtaatccagcactttgggaggctgaggtgggtggatcgcctgaggtcaggagttcgagaccagcctggccaacaaagtgaaaccctgtctctactaaaaatacaaaaaaattagccaggtgtggtggcgggcatctgtaaatccagctactcaggaggctgaggcagcagaattgcttgaacccaggaagcggaggttgcagtgagccgagatcgtgccattgcactccagcctgagtaacaagaacaaaactcca

SEQ ID NO: 5941 - DNA, 548 bp, Homo sapiens
caggaagtcaccctggaggtgaggcccagctccaggtcccagagatgaggccagagtgaagaacgaaagggtccgtgagtcggccctgggtcagagagaagcagagcaggccaagggcctgaaaacacagcagagttcatatggagggttgggcccaggctgaggcatccacctgggaggccaggtctctgtgtgtcccctcagagtgtttgtttgccagactcacggtcactaaggttttctccatgaaaatgcaagctacggctgggcacggtggcttatgcctgtaatcccagcactttgggaggccggggcgggtggatcatgaggtcaggagatcgagaccatcctggctaacacggtgaaaccccatctctactaaaaatacgaaaaattagctgggcgtggtggcgggcacctgtagtcccagctactcgggaggctgaggcaggagaatggcgcgaacccgggaggtagagcttgcagtgagccgagatcatgccactgcactccagtctgggtgacagagtgagactctgtcaaaaaaa

SEQ ID NO: 5942 - DNA, 589 bp, Homo sapiens
ccagaatcctggggtgtcactactcaggacctctccccacacagccctcatgatgcgctgccctaaggatgagggtcactgcccctctgcctcctctcaccacatcacacctccctctccatgtgtgtcctcacacagggtgggaatgcctggtgccgatgactgtctttcttgcttcactgtgagcactgaaagtgtgagatccccccaacatatccccagcatgggacacaaagactgcgtgcagtaagtacacaaatgtgtgtaaggagtgaatgaataaatgactttggagggcttgtctgcttatctcctgattttacttatggggatatagagctacaaataagagagttcacacaataggtggggcgtggcatggtgagccacctttgactttcacaactaatgccacactaaagctccatcaccctgaacaagtcatgtagctcctctagttctccttttcctcatcatagagcggtctaaaatgcaacttgtccctgtgtgcagttcattcgagaacacctacctaaggatcttctaactcccagtcttaaaaaaaacaacagcaacaataatagtaaga

SEQ ID NO: 5943 - DNA, 592 bp, Homo sapiens
gtcttagagaatccttatatgtccaagaatggctaatcataattttcgcagaagtaagacttgctttatcaaaatagactggcaatcaaaataagccttgaacaaagaaacacaaaaagaacttgggccctaaccagcacaaggctccccacaccccacttaaaaattaaaaagcgaaaaacaaggtaaagcaccaagggattaaaacaacaaatgtacttgggaagggctataaatggggttaaataagcttgacttttcagtaaagtgtagaatgcaactagttattcaataaatgtaaaatatacatagccatacttcaatttcatactaactgaaaagaggcaataaaagaggccggcttatatgtggacaatttcatttttaaaaagcggggtggggaagaagatacccaaactattagaaagatagcatcatggctgggcgcggtggctcacgcctgtaatcccagcactttgggaggccgaggtgggtggatcacgaggtcagaagttcgagaccagcctgaccaacatggtgaaaccccgtctctactaaaaatacaaaaattagccggacatggtggcgcatg

SEQ ID NO: 5944 - DNA, 97 bp, Homo sapiens
ggggaaagtcgttcttttagtaataacttgatggattgctatgtaagattacagacagttccatgaacaggatgaagtctttgatttgtgtatgtgt

SEQ ID NO: 5945 - DNA, 578 bp, Homo sapiens
ctggctaatcttttgcatttttagtagagacgggatttcaccgtgttagcctggatggtctcgatctcctgacctcgtgatccacccgcctcggcctccccaagtgctgggattacaggcgtgagccacggcgcctggccaatttaaaaatttcttaaggcgaggaaggcaaacaaaggagactttagattttacttataatgttcttgggcctgctgggaagtgactgtttttattcactcactataaggctgggaattcttgaagccaggcatttcatgtacatttttaagacatttcagtcaaagccttggtagtaaaaccagtgttccaattgtatcctccttatatagagagcagatttttattgaacttatttaaataaaaataagaatacagctgggtgcagtggctcacacctgtaatcccagaactttgggaggccaaggagggcagatcgcctgaggttgggagtttgagacagcctggcctacattgtgaaacctgtctctactaaaaatacaaaaattagccaggcatggtggcgcatgtatataataccggctacttggtaggct

SEQ ID NO: 5946 - DNA, 557 bp, Homo sapiens
ttctttgccttctctcacctgacccatgccatccccctgtcagaatgaatttggcatgtagtaaattcctttgctttttgaccctcctaacagctctggactctggctcaatggattggatcaactctctctgtcctcataccactagtggtttgaaataatatcaggaagcacattttatgccagcccttgagctgagcccaatatgctgcacaatacaacaagcttcatttctttttcccaactctgaagtcccagtaagagcccagtgctctctgtactgggtttccaggtaagtgagaaagaaccaagcgtagagctgagcaaaagcttaaacaacctgtaggccatggaggttttggctgggaacacagtgtgccagaaaatccggcaggtagataaaagtttgattagtcagaaagtcagacaaaacgacattactcaggcaaattatagagtccacaaaggtaggtctggattggcatccagaagtcaaaaggcagggatgactgatacacagaatcattcgtgacatccaacaactcctagtgaagtac

SEQ ID NO: 5947 - DNA, 587 bp, Homo sapiens
ctgttcagggcttccctcccaccccttcttaaacatttatcagtgtaatggctctttcttgcactgctataaagaactacctgaagactgggtaatttataaagaaaagatatttaattggctcactgttctgaggtctatgcagggcttcttcttctggggaggcctcaggaaacttacaatcatggtgaaaaatgaagaggaaggaggcacatcttacatggctagaacaggaggaagtgagtgaagggcaacgtgctacccactttcaaacaaccaggtctcacaagaactcactcacaagacagcactagggggatggcgctaaaccattaaaaaccacccccatgatccaagcaccttccaccagcaccttccccaccttcaacactgagattacaatttgacatgagatttgggtggggacacagaaccaaaccaaatcaatcagcacttcagtgaggcagaaaatgcacccaagaaatctcaactcattcattctggatgctgtgggggctcttctgagctccccagcaagcatgatcttctcttctgaaaattcctccaggcttcaccattttctctga

SEQ ID NO: 5948 - DNA, 585 bp, Homo sapiens
gcattcaacctttaccatcaagccacatcgacattccataggtatgaaggtgtacttaagatttttctttaaatcaaatctaaatcattcacttttttcttatcctgaccctaaacaatgacagccttgaaatcttggcttctgtgtgctaattcttaatgctctaattcatattcaaaaaaaacataattattaagatgtatgacatttggccgggcgcggtggctcacgcctgtaatcccaacactttgggaggccaaggtgcgtggatcacctgaggtcgggagttcaagaccagtctgaccaacatggagaaaccccatctctactaaaaatacaaaactagccaggcatggtggcgcatgcctgtaatcccagctcctcgggaggctgaggcaagagaattgcttgaacctgggaggcggaggttgtggcgagcagagatcatgccattgcaatccagcctgggcaacagagtgaaactccatctcaaaataaaaaaaaggcctggcgcggtggctcatgcctgtaatcccagcactttgggaggccgaggagggcagatcacctgaggtcaggagttcg

SEQ ID NO: 5949 - DNA, 587 bp, Homo sapiens
aaaggaatgcttcgatatagaaaatgttttcttccttcaataggtagtacataagcttttccccctagttgcagcgccctgtggtttatgaagaaaacagtgttgtaaaaatgaagttattgtcatgactagtttttggatcagactgtcctggaatgttttccgcccatggccaaaaacagaaactgaagaaatttaatgacatttttcttacataactaaagaaagccatgtgtaaaattgtttttaatgatgaaaggaactcctcgaatgcacaatcttcttgatccctttttcatttctgtaccctgagtattctgcatatgctcatggatctcagataatgaaattttaaaacaattttgttgtaatttagaaataattatagaagggaaaatactggttctgaatagataacatttcttgaattcttgtgaaacattaacctaaaacagcaggtgattcctgttaaaatttatatactgaattcatctgcagagtcacactgcagatatgagaaggaaattgacaaattaaagactattctcccaactcagaagatgattaatgtggtaaaaaaaaaaaat

SEQ ID NO: 5950 - DNA, 585 bp, Homo sapiens
gcaactttcagagtccagttagaagtggaaaaataaaaatgggaaaaaacctgattcatttttaaaatttttaatttgtttttaattgttgctgtgcagaagcaaatgtactggaaatgaattgtactcagttaattacaatttaccgtattattccatccttaactcattctgtgattgaacactgaatatcaaaattttaaatattaccttcacggctaggtgcaatggctcatgcctgtaatcccagcactttgggaggccgagatgggtggatcacttgaggccaggagttcaagaccagcctggccaacaatggtgaaaccccgtctctactaaaaatacaaaaattagccatgtgtggtggtgggcacctgtaatcccggcacctgtaatcccagctactcgggaggctcaggcaggagaattgcttgaacccaggagacggatattgcatgagccgagatcataccactcactccaacctgggagacagagcaagactccatctcaaaaataaaaatacaaataaatgttaccttcagcaatatttttcctttagatgacctcatgttttcccatgtg

SEQ ID NO: 5951 - DNA, 551 bp, Homo sapiens
ctcctggtgctccacccccaccccacagggtgctgactgcaaccaaagcgccccatggaaagaacagcccatggatggagcccaagaggcgctatgtcctgaacgggccgtgctgggtctagggtgatatttcccaatcacagagtctctaactttgcgacccactggccctgtgcttccgcttcccttggtggcccagggtaacaatcccactctgaaggctggaggacccacagaggcaccacccccagttaaatggctgcattgtgaaaggggatgcacaagagacatttcctgccttgggtctcttgcctcaggactgatgtgcatcaggccacggccaggccagcctgctggagagggctgcgttccctgtgctctgtgtggggaatggtgttcacagttctgggtcactaccgttgactcccccaagacacgggggcagatgtgctccattatataagccttgggtcaatcccagagaatgagcatcaaattcactcctgtctgaagctggctgccccaaggcatttgggttttggggtgagata

SEQ ID NO: 5952 - DNA, 302 bp, Homo sapiens
gcattggtaagtggtcagtgctttcgactttgtatgtccaaaggtgtctgtgttttgccctcactcctgtatagtattttagctgcctgtgaaattctccacagataggtgttcttccttggcaattttataatgttaccttattgccatccgatactcatcgttagtgggagtctgccaaaagtctaggtgtgatttttctttatgaacatttcgatctgagggctcatgtgtcttcggttcgaatttcaatgagatttcgggtaatatctcatcagactttgctgtgtgtgtgtgtgtgt

SEQ ID NO: 5953 - DNA, 273 bp, Homo sapiens
actctagaaactcaaatccctgggctccaacctcctcaccatggcttaccagcaagatcttccctgtcttccaggtttacatctttttttttttttttgaaagggaattttgggggggggcccccccgggaaaaccggggggggaaatgggctttttgaaaaatccccccccgggggtaaagggattcccccgcccaaccccccaaaggagggaggattaacgggctgcccccccccccccaagtaatttttggttttaaaaaaaaagggggt

SEQ ID NO: 5954 - DNA, 317 bp, Homo sapiens
gacatcgagtacctggtgttagtggctttcataatgtaacaggtgtttagagacaccatgaagggatagctcaatgtttttaataaattttttaagttaacttgaatcaattttgtcagagccattctagccttctgagccataaacaggagttctgcattagaaacttgaaggccactacctgttctgttgaagctgatattagaacaagtggtctttattccaacacctgttcgtctctcaattctaagagccatgcacctgctaggtaagtgcttctgggaagagtgtgaatggtgggagaagactgaaaaatg

SEQ ID NO: 5955 - DNA, 535 bp, Homo sapiens
acttctctgaaaaaggaatgggaagggatcagaagcccttctaaccctcactagagctgaggctacaaaagtcctttttatagcaacagaagaactttatcatccaagctttcctgacaaaacactaactccaagtagttttgaatccacctaagctttaatctagacattcaggcaggtcttcaaagcactcagctaaagtttagtttttctaatgatgcaaagatcattagaaatgatccctgctaggccgggcacagtggctcatgcctctaatcccagcactttgggaggcccaggcgggtggatcacctgaggtgaggagttcgagaccagcctggccaacatggatggtgaaaccacgtttctactaaaaatataaaaaagtagctgggcgtggcgacgggcacctgtaatcgcagctactcaggaggctgaggcacaagaatcacttgaacccgggaggcggaggttgcagtgagccaagaccgcaccactgcactccagcctgggcaacaacagcaaaactccatcg

SEQ ID NO: 5956 - DNA, 409 bp, Homo sapiens
ttgtgagtaaagcagaaattacctgtattctatggcaagtcgaagtttaagctatcttaaatgaaaactatctttgattccttataaaaaatatttgaacgaatctgatttaaatttattttattccatctttgatttgtgtgcaagccttatttgataagctttatcactgggctgtgtataacatacaacctgcttatttaatgaaaatagtagagcttaaaaggtattttttagacattaatgtttgtctactactgtatctttcaaaagaagcattatagggcttatgattcctctgttggtgctggtaagaattgcaaagaggcatatttccatcacttttttagaactttcctattcatagaaatttatttcttttaggtaaatcttatgtaggtatatatat

SEQ ID NO: 5957 - DNA, 418 bp, Homo sapiens
ggtaggcattacagattatttttattttctttatatggttctatatttttcaaattccacaaaattagatgcattgtgatcaagaaaataaaacaaaattctattttttaaaggccacaatttgccccttcttcatttctcaaaaactatataacccagagggaacaaagatcagaactcagccacataaataacaaataagcactgaagtcagttgtataaactaaaccccgtggtttacaaaaagagggaggaggctggccctgaagagtcctgaggaaaagggtggcacagtaagaggtctggaggccagggatgtgacatcaacaagacatcatcacaagggaagaagcttcacatgaggagggtctgagctagagccacagagcggcatggagaagaggaaagatgtttatga

SEQ ID NO: 5958 - DNA, 549 bp, Homo sapiens
agcacagggtgtcaagggaactgccgccaatatttcaagaacaaataattcttattttttagaagtattctggtgtacacaaattattggaaaacttccaaactcatttcatggtcttagcagatcacctaagacagaaagtgcaaaataaagtaaaagatgagatttaactacagtaaacacacacactcacacacacacacacacacacacacagattgcaatgcactcacagtcacacgcgaaaaagaatatttataataagtgaaaccataagcaagttaaaatccacatacatgcaggctgggtgaaaatcttgagaagactgcagactcgaaaataatatggattcattataaagagcaaaataaaaacattgcaaagaaaagtaaaagaagtcaaggagatgcacaggaatttaaaaatacaaacgggaataatttaggcaaaggtgctcaatcagagtattaagcagagtaatgaaaattaaaacaataatgatcatatcagcaaaaattttaaagactgataatatccatgttatcaaag

SEQ ID NO: 5959 - DNA, 558 bp, Homo sapiens
aggggtggacctgctgggcccagggcagccttgagtgcattggtggagagggctgccctgagttgtcctgtgggaggaccacctggagtttccaggaaggaaagaatagttgtgacttttctttttcttgtttccttgatttttatcaggatggtttgcgaagactatcagggaatgaatatgttctttcaacaaaaagtaagtttttcctttttaatttcttagatcactgtctataatactgcagtctagcttaagtgatgaaaataatttttcacctcattaaaaagtttcttggtatgtcataaagcctcagaaacaaagcagctgtccctgaggcggtactgtcctccctaagaaacagttaatcctggccgggagcggtggctcacaccgccgagatgggcagatcacaaggtcaggagttcaagaccagcctggccaacatggcaaaatcctgtctctactgaaaatacaaaaaattagccaggcatggtggcaggtgcttgtaatcccactactcaggaggctgaggcaggagaatcacttgaacccggg

SEQ ID NO: 5960 - DNA, 448 bp, Homo sapiens
gatattatctgttcaaatcttttgttaatttctaccagatcaccttgtcatattttcttattgacttgtagaagttctttatatattctggattaacatcttttgttgaatacatgcattgcaaatattgtgtcttttctgtggtttgtgttttaacgccttttatgggaccttttgataaacagaagtttgtaatattaacatagtccaattttttcaattagctctgtttttaaaaaagttttattattgtacctttcatatatcaatttgcaattcacttggaattgatattcgtgttaggctcaaattatatatatacatacatgtgtatatataaatgtagagagagagaaagcacataataaaaaggccattctttactgccctgcaaagccacttttgtcatagatcaggtaaccatgtatatgtgtaaatagaatttaat

SEQ ID NO: 5961 - DNA, 157 bp, Homo sapiens
cacgtggtcatatttgatatgcaatccctcatttacttacattaatgttttaactagtatttctagtcagatgtcagatgtcattaaaaccaccaacagaagggttaatatataagcagattgaaatataaatattgtaaaagaggaataaaaatga

SEQ ID NO: 5962 - DNA, 527 bp, Homo sapiens
cacatctgaggtttggctagacctggcattagctttgttacaatagtataaactctctcttttaaaaatggaaatacattctgttcctctaattctttactatcctccccctgtcccctccctccctgtctgttttttaactgtgggttttagacattaaaaatatatcaatttctccatttctctggggttcaggatttatgcagttgagtcttttaacttcctgtgatttttgagattctattttactcttgtcttctctgcacatccaagtatgtctatttcttagcgagtgatacctacaaaatatgactagtttcagaactatttccaacttctttgttttttcttgtatttctattgtggcactaattactagcaatatgattaatgcactacttactggtggctttgttcccttggtttttctgataatgctaattaatccaattttgaaaaaaatactttcagttctgctcatacatgtcagattgcaggtgccttggaaatcatttttctcccctttg

SEQ ID NO: 5963 - DNA, 591 bp, Homo sapiens
tgaatctagatacatcacaatcaaactgctgaaaactgaagataaaatatattgaagtcagtgacaaaaaaggaaacattacgtgcagagggataatacatatcacacaatgatacaaatcaaaaattatgtaaggcataagacaaggtactgacatctttaaaataccaagagaaaaaacctgacaactcagaattttatgtctggtaaaaatacctttaaaaaatgaaggtaaaataaagaccttcagacaaacaaaagctgagaatttattgcccataaacctgtgttacaagaaatataaaggaagttcttcaggcagaaggaagatatcaagtggaaattaggatacacacatacaaaaataaagaagctggaaatgaaataataaaggtaaatattaaattatatttcttactttaatcacttttacataggatataggatatgcatacttttttaaaaagctagcttgatacataaaaaactttagaaaaatatacagcaaaattttaactgatcttttttctaagtggaaggattacaaattatttcattttaatcttgatgctgatttgcatttaaaaattt

SEQ ID NO: 5964 - DNA, 577 bp, Homo sapiens
gaactcttcctgaagtatatttttaaaagtgaacacacaattaaaagttatgcattatatcagcacaatgtgaaagaaatgagtaatctaaactcctaggatctttctacataaaagcaaaataataattaagaaggggttaataggaaccaagtcatagaagctactagtagcaaattgaaaagcagagagttaccagtataaaacatttgttctggaaatatcaaaaatatttacacataaacaaatttatataaaaagtacatttgtataaatatttcagttatcatagagaaatatttatgttaacttcatacatcatagagacagtgctatttagtatgatcagcactgtaagagacattaatccagctgggcatggtggctcacacctgtaatcccagcactttgggaggcccaagtgggtggatcacctgaggtcaggagttcgagacaagcctggtcaacatggtgaaaccctgtctctactaaaaatacaaaaattagccgggcatggtggcatgcacctgtaatcccagctattcaggagtctgaggcaggagaatcacttgaaccc

SEQ ID NO: 5965 - DNA, 508 bp, Homo sapiens
ctgaagattgatgagccccgtgcttccctggagtgcaaactagcccagcacaccaccttcacagtagcagtgttagtggccagtaattcccataatgcttctgagtgcagaccagccagggccttgctcctatgggagcaccaaccaagctgaggcaccagctcaccagaccctcacttccccagagtgtgaaccagcctctgaaccagtgtctgagccgagcctcaggccaaccatctctaggcttcttccccagagagcaatctagccatgcactccataaccatagaacacagccagagcaagtttgctagccaatcagctctgtgcttccttggagcagggttcagcctggtgtcttgctcccaaggggagcagagctcaagtaggtggaccagtgacacaaatctctgcagtataagccactgaggcacttgcaggaattgctggcttggtaataactgaagaaactgcagagactacaccattgcacacacccagaacaaaa

SEQ ID NO: 5966 - DNA, 91 bp, Homo sapiens
ggattatgaagaaattggacctagcatttgtcgtcacaatccagtgtttggagtcatgtcgtaaaattggcttcatagttattggggtagg

SEQ ID NO: 5967 - DNA, 589 bp, Homo sapiens
tgctcggtgctgcttgttattatttttcattttcagcatgtatctgatgatcatgccagcctgattgcaccagttagagtgtggctgcccttgacctgattggatccatgtggcattcctttaaggagccttagagttgaccttcctcattctcctggctataatacatcatttccaccctctgttttggggcatctcctactgtggagaggctggcaggagggagtacctactaaccactatggagaccaaatgggtgggatatcctctcctctttggaacagtcagtggtaattatgacataccttgtttaccacctgcacttttctgaaactttcaagtagaggctgctccaggagtggcaagcagaccagtttgctcttgccatataaacttttctgtgattcctactttcttggggctccattcctcccaccagttccccaagactggccttctagccttccattaatgctgttatctttccaataaattttcttatggattaaggtagccagagcctgtttcttttgtttttgatctatagccctgactgatacatgatcttaaccataatgtgttctgagat

SEQ ID NO: 5968 - DNA, 568 bp, Homo sapiens
gggttgggtgctgaaacttcagtgatgaataaaacagaatccctgcatgagcctgaactggccacatcctctgctatcctctggaaaaatgaaagagactttggcagagctaaaaagtaacaactcatcagagaacataaactgaggttcttcagcataccttcagaagcagatgatccatgggaattgactattaacccaagattctcagaacaaagagttgactacacaaagcagacagattccacccatgaccattagaacaaactttttctatgtcacactctcctttccattcctgtctttacggattatctctcttgtacaattcctggctctttcttcctatgtaggaattagtttctttaatgccaatccaggaaaagattaattgttctgcagagttattaagccaattcaaggatatgactccccagtacccttggatggattatgtctcattagagtcctttctgggaaaacaataactagtggaacaaatgcctaaaaatatcaaccccatcgacaggacagtcaattggacaatttgaactgacaattcaaaatt

SEQ ID NO: 5969 - DNA, 585 bp, Homo sapiens
caaaattgtttactttactatcccacaaatattagagtcagaggtttcaagattttgctaagtcagttcctactacattcacaatatgttaatatgagatggataagacagtttggtcggctgtcaagtcatgagttgtataaacactagtacgcaacaaaatgactgtaaaagtcatgtggttcctattggtcatattaaattatacttgaagacttttgcttttctagctgcaaataactgggaaaagagtgtacttgagagcaagactcaaatttaaataaactgtaaatttctcaacatcttggaaacttcagttcagcctctttttatgtgcaagactaaacccagtacagtttataacttgaaatccaaacatatcactagcatactgggttctaatctcagctctgatccacacagcactattaacagtatggcccaaaatatttcacttccctctaaatgaaaaacacaatgatatgtaccagtcttaccagacaaaaaaagattaaatgagataaatattaacaacagcagttgtaactgttaataaataacacaggaaagtatcatttacttgaa

SEQ ID NO: 5970 - DNA, 588 bp, Homo sapiens
atgataaggatgagggcagaaaacagttcccaggaaaatgacagcaggaacgcctgtgggctggcctctgattaaaggttaactgacccacgcagacaggcagattcatgcatcacacatgtgtgtacatgctccaagctctccagtacagtaagtccattgggcaggggcactgctgttcatcattattctctacagccaatgcagcactgagtccaatgctgtcacgtgctcagaaaataatggttgagctatattaggcttctgtttcagttttggagaatgtcctctggctctttcaaattaacttcctctttcaagagaacagagagagacacctacaaaaagatgaacagcaaagcatagaaaggtagaaagtgggccagatgtggtggctcacgcctgtaatcccaaaactttgggaagctgaggcgggcagatcacgaggtcaggagtttgagactagcctgaccaacatggtgaaaccccatctctaccaaaactacaaaaattagtcaggcgtggtggcacatgcctgtagtcccagctactcaggaggctgaggcaggagaattgcttgaacccggg

SEQ ID NO: 5971 - DNA, 538 bp, Homo sapiens
cctcccagacacccatgtaagtataaaacaatatatggtcacagagctcataaaactagaccaaagctgacacagtcaaagttgccctagcatatacatgctcatttaggcagtgggaggatggcaaggcctccaaagctcaagcttctgttttgttccagtcccatggcatcactctctacagcatagaactgaacacaggcaacatattagctgtgtattaaaggggtgagtttagctgggcacagtggctcaagcctgtaatctcagcattttgggaggctgtggcaagctgatcacttgagtccagaagtgtgagaccagcctgggcaacatgtaaaaccccgtctctacggaaaaattcataaattaccgggcatggtggtgcatgcttgtagtgccagctactcaggaggctgaggtgggagcatcacttgagcccaggaggtagaggctgcagtgagctgagatcccaccattgcacttcatcctgggagacagagcaagaccttgtctaaataaaaaaaaaaaaaaaaaa

SEQ ID NO: 5972 - DNA, 482 bp, Homo sapiens
taccccttaatacgcattgtatttgtcctattaagaaaccaaacatcttcccatatagcaacttaagaaaattttttaaataataaaggtattaaaagtatgtgcctgaacaggtatgtaaaactgattctgggtttgcatatgatccatagctgcacaaggtttgtgttgaagtttagatgaagatcgttctgattttattccatcttgtaaatagccctcctgttccacttttcttcgcatagtagaattccaatgatttttgatagaattatcagtcctaagaaaggaaaggtatgatttaaaaagaaaaaaggattccacagatttcaacactgtgttaacttgtacaaagtgcttaaaacaaatttttacactgatgaaattagatacttttttcttaatttttcttttggagtttctactcaggaagataggtattttttaaaaattcaaaagataaactgtatgtgcatatgtca

SEQ ID NO: 5973 - DNA, 416 bp, Homo sapiens
atacacaagagggataacatctcactcccaatagtttagaaaaggaggcagaagaggtgtaagattatgaacatatctccctgaaatcataaactccaaggcaacccagtgacttcttaaaacatcttaccactttcatacattcgtccctgctactcagatttgtgcctagaaatattttgctattgttcctatcctgaagtagattctggaaaattaaattatcatcatcaaatcaagtaaaaaaactgtcatatattctacttttaatctaatataacatcttaaacattactaattagctaaaatatgactttttaccttcctctcagttttataattttcactatcctaatgtaatgacatggtttaaaaatgaatagaataggtcaagagaaaggtatatattataaagt

SEQ ID NO: 5974 - DNA, 552 bp, Homo sapiens
cattacaatccacctcaatgcccaaaaatatcccgctgaacatgcagaatttcaaggaaaacagtatgttttgcttatttgcaggaaagaaatgaatgttcaagagagggaaggggctgtggtttaaaatctccaacttgcaaaggaaagcatatgtcaaccaaagaatcatctttgaccctgcagattttggagctggtcctgtcggggcaggcagaggatccacacacagtatggaggggaaggcactgtgtttggggacagactgaaaggatttgcaatcctattgtttgggaacaatagctgacactgaacccttctttataacaggtatcatgccaagaatttgccaaatatatattttttatttagtaagataaagtaaattgcccaaggtcacatggctagaaaattgcaaagtaggacacacaatcctggcttgactgcttgctggatgatcttaacctttctgtgcctcttcttccagattgttaaaaatggagcatgataaggattctatctgtgctccgcaaacttgcctttccaattctc

SEQ ID NO: 5975 - DNA, 582 bp, Homo sapiens
gaggcatctcctgcactcacaggtgctgttctcagatggacaagaagttaggtcattcaccaggtgaggaggagggcggctgggcaactggccccttcctcacttcactctcttgccgtcattcattcatgcagcatgtattcacttatgattccagaatctttcccttcctcaaactcagctcaagcatcaggtcttggaagcccacagttgcctttccctcccatcctcatatttcccggcactcagctacagaataattaacaatgctcctcctcaggccatagccccttaagggcagtgatttgccttagctttcagtgccggctgggcatggtggctcacacctgtaatcctagcgctttgggaggccgaggtgggcggatcacttgaggtcaggagttcgagaacagcctggccaacatggtgaaaccctgtctctactaaaaatacaaaaattagctgggcatggtggcatgtgctcgtgattccagctgctcaggaggctgaggcaggagaatcacttgaacccaggaggcagaggttgcagtgagctgagatcacaccactgcactccagcct

SEQ ID NO: 5976 - DNA, 414 bp, Homo sapiens
ttggcaaggttaggggaggggagcagcagtaactataagaaaggcacaaagctctgcttgggtccagatcctctctctcccttacacagcaatgacttcatcaccaggaaaagagtagcaccctttgcatctgacagagcaatttaagacagaacaaaactctaacatggaaggagaaagaagacatcattagcccagaccatgaaagattcccttccattgagcaaagaaaaagttcagtgggaagactttacctccaagacccagggacacagcacctatgaagactgaggctgaatcagaaaaacagaaaaccctccatctctaccatgaggttagcaggttttgagtagtaactaacaacagtatactgtagggagaggatcaagaagattggtggagatcttctctgag

SEQ ID NO: 5977 - DNA, 383 bp, Homo sapiens
gggccctgcctctcagagtgtttctttttatcatcccatggtttcccacacagacaaactgttttaaactagacctgaggttgacaaactttgatccacaatagaatctggcccacccccaagatgactttgcatttttatatgtttaaggggataaaaactcaagagaggtttaatattttatataattttcaggtgtcacaaaacattatataattatgtccaaattacatagttacagtgcagactgtatgacctgcaaagctgaaatatttaccatctttcctcttatagaaagactttgctgagcgaaaccccatctctgcaaaaaaatacaaaatttaggcatggtggcgtgctcctgtagtcccagctactgatgg

SEQ ID NO: 5978 - DNA, 471 bp, Homo sapiens
gtaccaaattagatgcaaatattcttaacaaaacagtaccaaattaggttaacatatgtatcaagtagggtggtaatccaggaacacaaagttgaacaacctcagtatctattcattgaaaaactttcagtaaactaggactggaaagaaacttcttcagcttgataatggatacctatgaaaaactatcaatatatttaatggtgaaataccggacattttcaccccaatactggaaataaggctattatacattttaaccacttctatccaaggttggaaaggaagaattaaaactgctcctatttatcaataagattccatagaaaatcctaaggaatcaacaaaaatactattggaggtactaagttgagtttcacaaggtgtcagaatataagatctatatatgaaaaccaatcaattccatttctatagaactggcaattccaattccatagaactggaaaataa

SEQ ID NO: 5979 - DNA, 221 bp, Homo sapiens
atgttggccaggctgacctcgtgatccacccacctcggcctcccgaattgctgggattacaggtgtgagccaccgcgcccagactaagtcccatctttaggtccgcttggctgttccacggccacctggaggggaggtagggccagcaaggagggaccctagggtctcagggcagaagatctgccggaggagagggagaagagggttctgaggggaggaag

SEQ ID NO: 5980 - DNA, 588 bp, Homo sapiens
aaaagctttcttaagcagtcttcttaccaaatgcagatttgtttgagcattcttttggtagtcatccctccaaatgtgtgcacatgttttccccctgcacctagaatgctctttctccttgaagttcatgctgaactctcatctttccttcaggctcaccctaggtcttggcatatcaggaagtcttcagtggcatccctggaggcagcaggatgaaatgtacaaagcctggacctcagactttggtgttcatcctgtttctgataattacttatgacagccaggacacagcaattcatatttcctagcctaagtttctgcataagcacatacctgccacaagtttgttgttagtgcctgttctcttttcttcagtcatgcaagaaccttgcctgctacttctgtatcgtggcaataattgcagaactttacacttttcagatgtttcggtgtgagctctgaagctgctgctactgttgatcacacagtggcggtcacctactccttcagctcccactgcagcattgctccatatttaaaagggataacccaagaattgacgacgttgcagtaactcaaaggatgata

SEQ ID NO: 5981 - DNA, 579 bp, Homo sapiens
aggaaatctcaagtataacctagaagatgaagtatttctatctccatatgactagttctcattagtaatgtctttttttaaattaaaaaactatcaaggctgggtgcagtggctcacgtctgtaatctcagcactttgggaggccgaggcaggcggatcacgaggtcaggagttcgagaccagcctggccaacatggtgaaacaccttctctactgaagatacaaaacattagctgggcatcgtaccgtgtgcctgtaatcccagctatttgggatactgaagcaggagaattgcttgaacctaggaagtagaggttgcagtgagcggagattgtgccattatatcccagcctgggtgacagggggagactccgtctcaaaaaataaaataaaataaaaatagataaaactatcgcgcttggtcgggcccggtggctcacacctgtaatcccagcattttgggaggtcaaggcaggtagattgcctgagggcaggagtttgagaccagcctgatcaacatggtgaaaccccgactctactaaaaatacaaaaattagccgagcctagtggagggtgcct

SEQ ID NO: 5982 - DNA, 588 bp, Homo sapiens
ataatcagcagaacattacaacattgtaattgtatatatatgtgtgtaccttttaaacacccaaagtcataaatcagattacctggagtattgagtggtccagacgtactatattcagacgagcttgcgacacctattttaatacaaattatcaggctattttatgtgtataattttacttggtaaagtgatttttaaagactatctgacggatagaccataggtcctagtccagcaatgctaatgctagcagactaagactgtgtaaagctgtacaagaaaaaaaatatcaactcaaaaatttgctggggtaagaaaattaaatgccttgcctctaaattaactgacaccaaatcaatttttttctagatcatttgtcttaaaacttgtcaagggtaacagaaaagagttcagtacacagggttctaggtctcctatcccagtgtcaaccaaactgtttcccattctgaattgttttacttttaggaaacctgggtactatttcaagaggtcaattaaacaaaagattctgcactcacggaaaccagaaatatgaaaaccactaatctaaatgaactgacaccttca

SEQ ID NO: 5983 - DNA, 591 bp, Homo sapiens
cttgcaagagactcaacagggtgaagggtggaaaaatgtcagtgaacattgtggttgtaataccaccttacttcacatttcccagtgactttttatgcttcatatagaaatgttcaaaacatatctcattgcatttcatttctagattgcagcgtggttgtattgtttttccccctgtactttaaagactaagtacactttcatcccagatattaccaaaatcatacagatgattcagcacttagacaaaactgcctgataattttccatctttatcatttttcattcttgacctgaatcttttggtattgtgtaagtgctgcctaaatgaaaagtttttctttttagttttaagaaatgtgtgttataggccgggcgcagtggcttacacctgtaatcccagcactttgggaggccgaggcaggcggatcacaaggtcaggagatcgagaccatcctggctaacacggtgaaaccccgtctctactaaaaatacaaaaaaattagccgggtgtggtggcgggtgcctgtagttccagctactcgggagactgaggcaggagaatggtgtgaacccgggaggcggagcttg

SEQ ID NO: 5984 - DNA, 581 bp, Homo sapiens
ttcagaggggacgtgacttgtctgaggtcacagagccactgaacagcgtgccaggggataggaactcaacccagggttaccccaaggcccacgctgggtccatgccctcatgcccaggcagtacagaagccaccactaatggctgctgagattcggcattgcttccccgagtccactgggcctcgcccttccagtaaggccccccgagtgtccctcctgccaccataagcaaccccacacgctgctgtggcacaacaccacgccttggaacgaacccgatctctgccactgagtggtgtggggccttggacgagtcacacccctttaccaggcctcagttctcctcatctgtaaagtgggtcttaggacacggggattttgtgagatgggatacaagaacacagggggccgggtgcagtggctcaagcctataatccctgcactttgggaggccaaggtgggtagatcgcttaaggtcaggagttcaagaccagcctggccaacatggtgaagccctgtctctattaaaactacaaaaattagccgggtatggtggcaggtgcctgtaatcccagctactc

SEQ ID NO: 5985 - DNA, 394 bp, Homo sapiens
gcagttccatgacgtagttcagaaagcacagggcttagagtaagtcccacaaaataaaacagaccctcgctctggccttgggcaagacactagagctctgtaagttttactttctccatttaatataatggtgaggggagggtacctttatgaaaatcagccacatctacaaaaataaatgctgtttttcagctatactggtaacacaggcattctctagtatgagttaggtgatggattgcagtacatgggagtggcctacagaatcactcccagtccacacatgggggactggcacagaaacagcaataaggagtgcttctgaggtcaaaccgaggcaggaattaggagaagaaagtgaccaagtgcaggtagagaatggggaggagctgag

SEQ ID NO: 5986 - DNA, 581 bp, Homo sapiens
ggtggcggtggatttttccctccagggaacatttggcaatgtcaggatggtttgattgtcacacaggaggtggggcttactggcatctagtggacagaggccagggatgctgctaaacatcctccagctcacagcaccccgaaatgaagatgtatctggccccagcagtgccaaagttgtggaacaatgaattagaactcaaagggggaaaataggatactgagtaggatagggaaatatcaaattgtgaaggatattggtccaatttaacaaacacttactgaacatcaactttgtaccagggcctgtgctcagcaccagggactaaaaaggtgatcaaggcatgatctctttaaaatcatataacctggccaggacaggtgcggtggctcatgcctgtaatcccagcactttgggaggccaaggcgggtggatcacctgaggtcaggagtttgagaccagcctggccaacatggtgaaaactcatctctactaaaaatacaaaaattagctggacgtgatgacttgtgccctgtaattccagctacttgggaggctgaggcaggagaatcgcttgaacc

SEQ ID NO: 5987 - DNA, 547 bp, Homo sapiens
tggaggcaacatagtcaaagaccttggtacagtgctttaatatgaaatagacatctctcccacctccccattaggcatcttttatgcttatatgcatacttgtacaaggaaccaatggcttagatctgtaagggtctaaagtatatcagacgagtgagaatttcatcaaacttgtaattttgacacagcacatacatatttttcacatgggatacatattgttaacaggagaatttggtaacaagtgattgaacttctagagctggtgatttttttagcagaactttagatatttaagaaaaattatctgcatataacagtcaaatttttcccttcatacaccccctgtctctaacctacatgtgctgctctatgaccaggtctaaattccagatgttccaagtagctcttcatttagtcttgtcttctgatggcacctaaacaaatatatcaaaacttgtacaacatttagaaagtggaacttgaagattttctttctgttagacaaatagacgccatctggaaaaaataaccccaggcgcttgga

SEQ ID NO: 5988 - DNA, 572 bp, Homo sapiens
gcaggtttagctaacaaccgctccgatctcctcttgggctcttccttggcggcccctttgtcagagctgaccttcctcttgggcatcctggcagcggggagggcatgtgccaggatcctgcggacgggggcgcacctagagccttcgcgaagctgggctgcagttcctcccgccgcccgagctgctgagacccactgccttaactacattttgaaaacttgaaccaacatttcaaaatcaggacatttcatatacaagtctggatgtcagtcttcccttgaacaaccagggcctgcatttgcgtagatcagctcaacaaaggaggcagagaagggtatgtgatgttcaccacagctctgacaactccccagtgagactctgcctctctcaattgtcctgccaccgtttttatctccaaataaatacgttttataccttcatgtctataaagaattgaaaagcaaaagatagaccaataaagtatcacattttaagaaaaagggaaaaatatattttcccttttaaatttcaactaccttctttaatttaaattaaatatccaaagactttct

SEQ ID NO: 5989 - DNA, 585 bp, Homo sapiens
gtgcccggcccttatccttaaattttaaacaaactagccatttatttgtttaactactaggctgcgagatactaataagtcaaactgttggaattttaaaagtcttgaacttcacactagggaaaccagtaggggaaaggctgtggctgactggtgaaggttttggaagcttattcctgggagatcaagggataccaagccactgtcaggagccaacaagacttcagggaatgagacatcacaagaagtcaggagttggtgacaagggggctaaacaggaatctgatatgaggccacaaactgggctgggcgctgcttataatctctacagatccaggctgtatttgacccctcagcccaccccaagtgactcaggaataccaggaattaaagagtcagtagagagggccaggcgcggtggctcacgcctgtaatcccagcactttgggaggccgaggtgggtggatcacgaggtcaggagatcgagaccatcctggctaacacggtgaaaccccgtctctactaaaaaaatacaaaaattagccaggcgtgatggtgggtgcctgtagtcccagctacttggga

SEQ ID NO: 5990 - DNA, 591 bp, Homo sapiens
gtgcaatgctgtgtgcattcacagcaaacacctgagggaggaaaagtcaatggtcactcatctcttcttggccttaaggccatgatcaaacaggaagtaaaagctaaggttatcttgtaaactgatgccaaaaaataaaaagtgggagacatataggaaactcatttaaagaaatcttctggcccataattgaccacgaggttataatcatcaagggcttactctcagaaagccaagcttaaaaataaagacaaaaacatttattaagaagctagtagagaactaagtagacacacacagcaggacaggcagaatgtacagaatgactccatgaaagtcacaagcaaataagaagcaaaaagaaaacctaaaatgacaacataaaaataggaacacaatacatctttgtgagacagaaatattgtcacaatacattaatgaccagaactcaaaaaatatatattaacatgcaaacaaatggtaaagtaagccacatgcacaaagaaaaagcagcaaacaccacatttcatatggaaactttaagcatgaacgtagtttacaaagacattaaatcaactattatcaatatat

SEQ ID NO: 5991 - DNA, 594 bp, Homo sapiens
gtactaccttaaaaaaaataaccctttcctggcctttcatatagttgaacattttcataatgactaaaaaggtaaaaataaattaacaaccataattaaattagaattctactttttaaatcagatgaaatactgtataaaatgtccagaaaatctagtgttaatgaggctgtgcatcctggacatttgatgtctcatctgtgggaatgtgaactaacccaaccattgtgaataactattggctctgtgtgttaacagtctagagtcctgaaacaaggatcttaattctaaaataaaatcctattctaagaatataccaagggttgataatgaaggaagtttcaaagttatagagaagaaccttcatcctagcattatatatgtaatcatccatataaaccagatagtgttgaatgaaactgcagaaaaacaaagagcctacagaatatgtttctctttgtgtacaactgtaaatgtacacatctatccacgtaaaattttacatctcaggaggataagtactgacatgctaacatgctataagataagaaattttacttttctacaatttcatacacacacacactccctcac

SEQ ID NO: 5992 - DNA, 589 bp, Homo sapiens
ccaggcatttttctgtatatttatttctaatttctgtttctttcttatgaattgtctggttaagtcctttctcattatctcaaggtgttttagtatgagatttaagaatattagatatataagcccttgagctatcatattagttagaagtagttccccttttttggtcttttcatttttattactatatgtacaaaagtttaacatcctatggagtaccttgttcatggataggaagagtgaatattttaaggacagctctactctccaattggtttatagatgcaatgcaattctaatcaaagtctaaaaaggttctatgtaaaaccttacaggtttactctaaaatttatatggaagaggaaaaggctaaaagcatccaaaatacacttaacgaaaaagagcaaaacagggaggtttgtctcccagaaattaagatttattggaccgggcgcagtggctcagggccgggtgcggtggctcacacctgtaatcccagcactttgggaggccaaggtgggcggatcacctgaggtcaggagctcaagaccagcctgaccaacatggagaaactccatctctactaaaa

SEQ ID NO: 5993 - DNA, 587 bp, Homo sapiens
tgcccaggctagagtgcaatggcacgatcttggctcactgcaacctctgcctcctgggttcaagcgattctcctgcctcagcctcccaagtagctgggattacaggcatgcaccaccacacccagctaattttgtatttttagtacaaacagggtttcatcatgttggtcagtctggtctcgaactcctgacctcgagtgatccacccgcctcggcctcctaaaagtgctgggattacagatgtaagccaccgtgcccagcctgaagtatttagaattggtttctgggaaaaccaaacactgcaaatttactacatcaattagcaggcaacagttaatatttaatattcaatgactaaaacttcctaaagaaatgtatatgtccctaagagtaaaacattctgaatagtttataaattattgattatatcaacaataataccaatttgtttagctaacatttctctaatgaatgtatcatataatgtcagttaactatgtattttgcttctacttaaattttagattcccaggttattttttcccataaaagcaatctagccattttgatatgttaagtcctatcga

SEQ ID NO: 5994 - DNA, 582 bp, Homo sapiens
acatagtagtaaatactttgttttttattaaattagtaatctaaattattacctctggaacaatgtttcttcaactatattccaaagaataattaccttaccagaagcactgtaccccaacagattccaccattatctatgttcaagaaaagttataaaactgtgaattaaatgttcattattcaataaatgaattgaactttacctaatccttatttgacagtatatttttgtggcaaacattaacatttgacaaattagaattttagggatgcagttttgaaagcttccccccaaaaagggaggtttcctctgggtgatacaaacttacttgattctcttctatcaataatcccaagattccagatgccaatgtcaggcactcctgctctaaatgggtcactaaggaagtggctctaaattaaaagagattggcttcaaataaactttgattgcttattattaaatcatccatgaggtttatcctattaccagacaataggattttatctcagttattagaaattcagtataaaaggccaggcaagggtggttcatgcctgtaatcccagcactttggga

SEQ ID NO: 5995 - DNA, 536 bp, Homo sapiens
gttactcccattttataggcaaggatattgagacacagtgaccacacaaatagcaagtggcaagccaaggtttgaatcccagtttgaggtcaccactgtgctctgtgaacaggacttatgatggccaagtactaatattacaatattggaatttatactctctggagttacgattcagggagagatgatttggaagtataaagtcagatattttcatattaaatctaggtcaaatgttctcaaccagaggttatttgcatcactctcccaccaccctgaccaggagacatttggtaatgcccagagacatgtttggttgtcacaactggggactgctactggcacctagtgggtacaggctaggggtgccgtgaaaaattccataatgcacaagatgcaccacccccccccgccaaagaattgcctactccaaaatgtccacagtgctgtgatccagacaccagctctaggggtttggtttagttgccatattttcctctcccctacccattcttctctttggattttaattctct

SEQ ID NO: 5996 - DNA, 586 bp, Homo sapiens
gaacaaacaatgcttttacccatttaaatgagtttttaacagtgggagttttaggcaagttttaggcaagtattttgccttaacagaagactctgcctatttataattttttaaaaacagattcattgactcttagagttgaatggcttcttgtctcatccaacccactatgtaatgtagttatccctgtattgcatccatgacagatcatcctccggcatttaccaactgccagggacggtttcacctcaccagcaagctgttgaataaattctcatgtgaatccacaatctgcccactgatctagagagttgttttctcctttacctgacagctcttcacatgtttgttagtttctcagactacctgtctctaggaggtttagttattgtctgaatgagatagtttccagacttctcactatcctggtcattctcctctcagtgctttctagttggcaaatgtccctcttgaaaatgttgcctaggccgggtgcagtggctcacgcctataatcccagcactttgggaggtcgggataggtggatcccttgagctcaggagttcaagaccagcctgggcaacgt

SEQ ID NO: 5997 - DNA, 323 bp, Homo sapiens
atgagtaagacataatccatgactctaaatagctgaagtaatgactataatgcaaattatttgcacacaagataaaaagtattatagctgctgggctagaagtacttgcaagatagaagtgggagcaaagaagagaatgcttaattttgccactgggcacatgaaaagaaaggattcacagagggggtgacactttaaagaagagaatacttaattttgtcgctgggcatatgaaaaggaaagattcaccgaggaggtgacactttagttggaatttttttaacgtattgatgttcaccaaagtggagagattggataaagag

SEQ ID NO: 5998 - DNA, 272 bp, Homo sapiens
  misc_feature 96, 97: n = A,T,C or G
aacagagcaagactctgtctcaaaaaaacaaaacaaaacaaaaaccagtaaaaacccataaaacttggaattagttttagagaggaactggggctnnaacagagcaagactctgtctcaaaaaacaaaacaaaacaaaaaccagtaaaaacccataaaacttggaattagttttagagaggaactggggctttgaggagtaaattttctatattttgctggaaacctggtaatttttttttttttaaactattattttaagttagggggtac

SEQ ID NO: 5999 - DNA, 558 bp, Homo sapiens
gcacatcaacaaattagtaaagttagtcctttgaaaagtactaggaactggaatcagaaaacctgaactggaattggaaattctcaaccatatacttttgctaactctatgacttcagataagtcacccagttattctggaacttggttaattcatctaaaaaaactggttattataaagataaaagaactgtttatttaaccaacagccatttcccccatctttcttcctgagagagccctgattttactcaggtatcaggcaggcagcaaagtgctcggaaaaggcaggtccagcccaagagctgaaccactattggtctaaacccatcatggcaaccccattcccattttccagtgactggtttgctggtacgcaagtaagccagttctagacaatggagcacgagagtatgctggctggggagcttctcagggatgtttttgcaaatcaaaagagcaatgcatgaaagggaatgacccttcctttctgtcttgagatattatcttatgaggcagccatcttacaaccatgagaagaaagccggccgggtgcggt

SEQ ID NO: 6000 - DNA, 89 bp, Homo sapiens
gggtctggttttactcatctctgagtctagcctctaacccactgcttgacgcagaaaaggtacctggtgaaaatctattaaaatcaatg

SEQ ID NO: 6001 - DNA, 528 bp, Homo sapiens
gttgcagacatggttcaaagcattcaggtagaactggaagccgaggcggaaaagatgcgggtgtcccagcaagaattactttctgttgatgaatctgtttacactccagactctgatgtggccgcaccacagatcaacaggaacctcatccagaaggctggttaccttaatcttagaaacaaaacagggctggtcaccaccacctgggagaggctttatttcttcacccaaggcgggaatctcatgtgtcagcccaggggagccgtggctggaggtttgatccaggacctggacaactgctcagtgatggccgtggattgcgaagaccggcgctactgcttccagatcaccacgcccaatggaaaatcgggaataatcctccaggctgagagcagaaaggaaaatgaagagtggatatgtgcaataaacaacatctccagacagatctacctgaccgacaaccctgaggcagtcgcgatcaagttgaatcagaccgctctgcaagcagtgactcccattacaagtttt

SEQ ID NO: 6002 - DNA, 581 bp, Homo sapiens
accatacacttttacaatttatgcagtagctagaagttagtcatttccatctttagcatttctacttgagacaacttacctggtgagattttgccaccgcatcaaaaaacaaggaaagtggtaatgatggctgaaacattaaggagaggtacagaggtatgagttctatatttgtggataatattcaggttttctaaaaaaactttccacaaagcaatcacatttctctagtttttctacaaagaatgtaaatgctgcccactgaatgatgactcaattccaaaatgatgattccatttcttgagaattacatttgacagtacattactgatgatggtgttcaagttttttaaaaaagcacttattgtggaaaatggtaagatgaaaatcaccactttatgattttcttgtgtccacgtaggagcccagaactatcccaatacatattaactttctttatttagtcctccatttgtcacttatggtgtcaaaatatcacattaatttcattgctgtaccatagaagaatggcaattatagaaatactaagcactatataaaaatactcacagtgtgctaca

SEQ ID NO: 6003 - DNA, 389 bp, Homo sapiens
tggtatttggatgtacaacataactacattctttactgctgttcttggaaatgccataacctaaacaaattcttgtttccattactaaattcaaaaattttgagtcagtgcagtggtagatatgggtaaacatttatagcatttaaaaaaaattgtaaaatcttaaaaaaggatcaagatttggcagtgctgagttaatagcagtcaatcaaattgaatttgaccattgggactgagatttggccccttaaccatatgttattgctttgctccagaaaatattttagtagtattatcagaaatacttccatttatttttttcctttttttaatttttatttttggcagagcatagcatttggtaattcttggggtcattactagggttt

SEQ ID NO: 6004 - DNA, 586 bp, Homo sapiens
tgatagttaagatcaattaaccaattagttacccattttcatttttcctgtatattctttgtagatcacttactaaaatgattttctaagaccttcactttcttaagtaaagaaaaacaatttgactgagacttggccatttagctaaaatctaaaagacctatttaatttaaagtataagtcaagcagagatcttatcttctgtccataaataataagaatgattgtttttcgctaagtggaaaaagtgagatgaggcaagaagttgaagaatgcctagccaggtagcatatgaagcctacaagtttccagccgtgggtctgatgaaaaataatgagacatctgatggaacttaggatcttatttgaaaaataagccatcaagtactttaactttctggtatttcaaaagtaaaaacatatactaatcacttgtttttatttcacttatttgacactacacatctgtcttagtacaaactcatgtttatgcaatgagatttattagactgatagttcatatcttagccccttttcatagagaatcattgaaaaaaaaactgttcactgtgagaaaactctctccc

SEQ ID NO: 6005 - DNA, 461 bp, Homo sapiens
tggtggatgagatgtatgaagatctaaatgcctgcagatagtgagctgtctgcaactaccacaaagcaaaatcatgggcgataactccccagggtaggatctggcctgagcatccccactgggagatgggaggtgatgggctctgtagtgcttagttgaatagagttatctatgtcagtattccctctatgcaaagatagttgagagttcacaagttgtaggctttcaagttgagctatgttagatatatgctcccctgatggaagacagacatgtctccagggttttgagggtcaaatgacagaatgtatataaagtgttttgaacattataaattgcctccttagaggcaagggaacatcaaatttggttgttttcttgcatcagagacttctagctcagatttctttgtcggccatttttaagggcatttccaatgagtttttaagtgtaatgagttt

SEQ ID NO: 6006 - DNA, 581 bp, Homo sapiens
ggttccagggaggagttcgggagtatctaagatgactgaggggtccaggagagtggggcctgtcttcagggttctgagccaagggctactgtggctaaacaggagcagaatattctgtattagatttcaccttgccccagggaagatcattttgaagatggaggggctgcttaggctgcaggaaattgcccttccctgaaggccttcagggtacctgggggccactcagtgggaacactagaagtgaataattaaagtgtccaattctgggctgcagcgggtagccctttgcagttcctccattttttagttttggtgacatgacacctctcccttcctttcacaatttgcaagtatactagtttgggtagatcggatctccgtcctttagtctggagggcccccatctgtcctcagagttcagatgccccaggacccacttggatgcagtggggagtcccggagttgaggctgtctgcccagaaggggattgcacctctgggagacctgccttcctgtgctgatgggcccagaggcaccgggagaagctggccttgtatctattataagcccaggagaag

SEQ ID NO: 6007 - DNA, 585 bp, Homo sapiens
gaacatttatgcatgatatttgactaactcaatttcctaaacctccccattaaacctttaatgccttatatttactaattctgaagctagcttttggattaagaagctttaacctaaacagttaaaaacactgcaaaaacaaaatgttgattaacaactcacagatttatactctagcgtctaagccagtcaaatatatggatgggtagatagattagatagataggtagataatacatatatgagaaattagagagtgagagaaatggaaagatacaggtaaatataaatgcagatatagatacgagagagagaaagatttatttctggctaagatggatgaaggacactccactccaaccaactctttcactgaatgtagctataaaacaatgtacctagaaagaatgtggatgaagcagatgactctgaaaagaaaataggggcgggtgaaagatttatacgatctgaagagaaactgctaaagaaaatgcggtacatatacaccttggaatattatgcagccataacaaagaattagctcatgtcctttgcagggacatggatggagctggaggtcattat

SEQ ID NO: 6008 - DNA, 588 bp, Homo sapiens
gaactctaaggtttaccatatgcacaggaagccccatgagaggttccttaggagtcactataaatttgcagtctaactgatatatgtatcaccagataggtcccaataattataaataataactaaatactaaagacaccatgtataccccagttattatacttcttgtgggaaggcctgacattggcctgcttcccttatgaaaacatggtgacttgccccataggggatggttataagaaacctttaagtgcttaagaaaatgccaccagtagaccttgtagtcttcagaaagctgtaaagatctctccaaaatgatgctaactgtagttattcaggaagcttttcagaaggatacataactcattatttacatgtatttttaaatattattattgatatagtcatacccccatattttgggggtgcatgtaatatttttcttacatgtatacaatgtgttattattaaatcagggtaattggcatatctatcacctaaagtatttatcttttctttgtgctgggaacattacaatttgatgctttttcttacagaagtgacttagttagaaaaagtggtatgaaa

SEQ ID NO: 6009 - DNA, 575 bp, Homo sapiens
aattcacagagacagagtgcaagggtagttgccagggactcgggggagagaacagggagataccacttaatgaatatagagttctagtgaaggaagacaaaaaacttctggagatagatattggtgaaagttgtacgacgatgtgaatatacttaatgccactaaattgtacacttaaaaacagttaaaatggtggattttatgttacaaatatttttccataatataaaaaatctttattaactgcatctatccttcactgtcctttatatttttgttaaggcataatagcatttttataatgctttagtaatcatttcatatcatctggttgtgaatctttatctttaaatatagcatttatttatcataataaaattggaactagatccaaaacaaaacatcaagctctctagtaaatgagaatatgcattgggaaagagtgaagagctctcatctgggtcaatgaatttaggcaaggtctagaatcactcatttttaatttttaatttgttctctccatctggaaagccatagtcacatggtaaacatgcgcctaagacaatgtgcctttc

SEQ ID NO: 6010 - DNA, 556 bp, Homo sapiens
agcagcagaatgcagggggacaaataaccacctcaacctttactgtctcttttcacaaaatggtcatggctgaatgaggctttgggacagtgtgagtggactctgctcatagataagttaccttgaggaacaagactgaaatagatgtttcataaaagtgtctttttttcctttttcctcattcagattataaattcattaagtgcagaaactttttctttttttttgagacagagtcttactcattgcccgggctggagtacagtggtacaatctcggctcactactacctctgcctcctgggttcaagcaattctcctgcctcagcctcccaagtagctgggactacaggcacgtgctaccatgcccagctaatttttgtatttttagtagagacgagatttcaccatgttgcccaggctggtcttgaactccagacctcaagtgatcctcttgcctcggcttcccaaagtgctggaattgtagatgtgagccactgtgccagtccaggaattaatgtttttacatatgtttatctttttaaggtttttttggt
